United States Patent Application Publication US 2007/0054278 A1 - sequence listing, part 35

SEQ ID NO: 94280 - DNA, 262345 bp, Homo sapiens
  misc_feature (1)...(262345): n = A,T,C or G
ttgcccaggctggagttcaatggcacgatctcggctcactgcaacctctgcctcctgggttcaagtgattctcctgcctcagcctcccaagtagctgggattacaggcatgtgccaccacgcctggctaattttgtatttttagtagagacggggtttctccatgttggtcaagctggtctcgaactcccaacctcagatgatccgcccacctcagcctcccaaagtgccagcattacaggtgtgagccaccctgcccagcctaattttgtgtatttgtagtagagacgaggtttcgccatgttgcccaagctggtcttgaactactgacttcaggtaatccacccacctcagcctcccaaagtgctgggattacaggcataagccaccatgtctggccttgataatgttttaatgagatgtacaacagtccgctgcatagagcaaatgctcagaactatttttgtcttccttcatattgctacttcctgatttctgtctgttttgtattttcctattttattatacatttcttggtttgtaaattttctcaaatcctttgtagaaaaagataagctttgattttttttttttttaaatcccattacccacctggtggcrtaacaaagccgagtgtaggatagcaaaagctgcaggcatcttcttgatcaaagtaaaatctgctcatggactaaaaaagtattacgttctttcttccaactaagtaatgccagtttctataacctcatcttatatactttaatgaagcttccttcaagggctgtgtatttcgcttacaatttttgattccttggtgtagaggccatttttaagagtcattttctctattatagacatgcctttgtctgctttcttttcatttctgagatggcactcactcacggctttatattccaagacagaaatgctattaatgacttagttagataaaaactgacagagcagaatcttttgtctccaggttcttaaaaaaaaaatccatgcataataacatgttccatccctagaagtgatgattttctgcttttaagattctgtttttttacaggttttgtttttgttaatgtgctatactccatgagactatcttaaaacatattaaacccacaaggcctattccaagattaagaaaaaaagaaaaacaacaaagagcacatcacttaattcaaaacatttcaacaattacgatgtcatttaagttggaaagcaaaacaaataaacaaaacattggtggctcttctgctacaaataggaaaaaaaaccaaaaacaaaaaaaccagcagatggtttttactcccatagcagggcactttgtacagtgtatttaaattgctctcagaggctcacttatcagacccattttttcaagcgtcaactaaaatctatgcttgacatagcccgtaactagggccacgtgattacaaccaataactggaaaattacagtgttattgaaactattgctgatattcttgtggtcctcctatcagttcatattgtctatcaccaaagggaaaagaagacaaaagatacttgagttattagtgggttggagaaaaggctgggagaaatttagtgatatccgttgatttcccatacatacagagattgggagggccaccctttgcagagaggaaagagaaaggaggtctcctgttggggagatctgctttagaggttaggaagaatggtggagttgtaagacattggaatcactgtctaggaagacagtggccttttatccagggctatttaaaaacaggacagagcttcatctatctcccacagttcagatgtgaagagagaatgattaaattgcttcttccagactgatgagtctatagtatatgctagaaacacttgtgaatgtctgggagaaacatagccacaaacgaattgcatgttgagcaatcagctctatccacctgctgtgttcaagaagcaactgttgacatttgctcaaatgtgctcaccacaaaccaaaacaaaataaaataaaaatggggtaaataggtgagggatggatgtgctagctaacttgattgtggtaatcatttcactatatatatatatatatacacatatatatatatatatatacacacacacatatagtgaaatgtattattatatattatatatactgtatatcttatatattatagaacatataatatataatatataatatacagtatatataatatattatatattatattgtattatatataatacaacatataatatataaatataatatattatatattatatatgttatatataatataacatataatatatttatatataatatattatattatatattatatatttatatataatatatttttatatattataatatatttatatatatttttatatattatgatatatttttatataataatatataatatatatatattatatgatatatttatatattatatgatatatttatatatattatatgatatatttatatattatatgatatatttatatatattatatgatatatttatatataatataacatataatatatttatatatatataaaatcttcacattgtacaccttaaaagtcatacaattttatttgtcaattatacctcaataaagctgggaaattaaaaataaaaaggagcaactgttgtgagtctttaataaaacatctgtttaggacatgatggaatacaattttaagttcatctccttcctacataactttgtgttcatatctttattttcttctatgtaccatctactactaaattatcatgcctttctgtaatttttttttttttttgagacggggtctcgctcttgttgcccaggagtgcagtggcacaatcttggctcactgcaacctccgcctcctgggttccagcaattctcctgcctcaacctcccaagtagctgggattacaggcacctgccaacacgcccggctaatttttgtacttttagtagagacggggcttcgccacgttggccaggctggtcttgaactcctgacctcaagtgatccacctgcctcagcctcccaaagtgctgggattacaggcctgaaccaccactcccagccattttatctatttttataagccatcttaaaccctttctggaacaagaagggatatcactgaataaaataatttctataaattaaagctttgggggcttttcatggcaggaattatgccaggtacaggggatatacagaggagaaaacttcacagtgtaggagtgaacatggacagatcaactagcaacagtacctaagaatccctgcaggggaatgggattcctgtgcatcatggagcagaaagttccactcttgggaatgggaaggaggcaaggagcggttacagcagagttggtgctggagcataattctgatgcagaagtgcagatcctgcctgcaagtaggaatggggaggatgtgtgcaaagacagggtggtgggagagggtggggtgcaagggacggctttgaggctgccctgcttaccccggacaaatgtcatcgttccaatccagtaatcactgacaaacgtcttctttgactaatgtttccttctctacctttgctctcaccatgtggacagtgatcactggcgtaatttgacagtttcaggagagttctctagtttccaggggattttggtaaaaatacaatagcagaattgtcttcagcaaaagagaaagaccctacaatccttttgaggccctgattgaaaccacgtacataaaaatctttatcttaggctcttcatcatgaatgcaaatatatcctactcaatcgtaaaccttacaaataaaggagcctctcccctgagcaccagtatatagagcacctttacaaacacactaggctgtgtaacccttggcactttgattttgtaagaaaacctgaaggtttcttgaatttaatgcaagttcataagagtgaggactctggggtgacatgaaggaagcctgttcagtgacggagcctggctgagtgcccaggccctatgtctcagtgaggtttccttcctaaagcattaccagtaatatcttagcaagagatttttatttattgagcaggtactgtactaagaacttgacttgcattgtctcattaaattctgacaacagcccatttacagaggaggaaaccgaggtccagaaagattaaattgtccagtgatagacccacagctgggaagctggtagatgctgcctcagctttgattatggtctaattcataattattttgaatctctgtaatactgtaagatggtattagcccacttaaagtatgtgggaactaaacaaaccttgtgctcttgcagcagcctttctgtttggggattttacaaaggtctctggacagagcctcctggagggctgtcagtttactgagatcctccctgaactgcccagaatagccatggtgccttgagataggtgggtggttcctgcttccctggccttcagcgctttgccagtcttcctgagaggagggatggtttccaggcaacaccatggtccatctattttcatactgctatagtgacaagcattttgaaaaaataagaaatatggccccaataaggtgatgagatgctttttggagtctgtcttgtctgcctgtcataattctgcagcaaccatcagtagggccaaaggaattccaaacaggagacacagatgagtgaaagggcctgcctgccccatggccatagaggaccaagactcagaatgccaacgctgtgctttctcaggctaatagactttttacaacatcctggtcttggaggatggaaaaagtgcaggcctaaattactgctaactagattgatctaactgaaagagtagactattgctgtggtctgctcatcatagctggtaaacaaaaagtcaataatttgcatttgattaggtgcataagaagttacagttcctgggatctaaacttcatgagtcaacacttttttaggccttaatcttctcttcttgaaaactacatatagaacaacatgaacttcaataaccaggaccccccaaaaatgttcatttaaacgcaattttaatatactttgatgaagtcagaatcacccttgcttgtttctgcatgagttctatttgctgcctgtccttctgtattttcaaagttatctgtgcccaaaacgagttagtgctctgcatcaggttggctcattttaagtgctcaaagttgtaaacaatacaaaaatgcattttttctcatcaggtacaatgttttctacaataacattggctccaagggagatacagtcctctgagattggattttattgaaaatcatcgtattcaaagagtactaggatgtttgaaatccttcatagaaacttcatacagcccgaaggcattctgtagagtgaaagatgtaaatggaggagtgactgcctcacccagcagggaccactcctaattctgggctgtgtgtagggacctgaatgctgcagggatcactcagaggttaataatgataatcatcgtttgccttaaagaaggataaaatcagatccaatctaattgacgttggagaactcgagggatggcatttggttggggaatagtcacaccttcagggtcattctgcacatcccagtccttctggtatcaagtgggttagagccgggagaggcagagactccaacaaaacatggaaacgcaggacaccctggtgcacttgtgtttttgttcttgctgtccccgtgtgaacccagagctgcagcctttgtcacgaggaagatgctctatgccatgtttcatatctgcccagcagggcagctcactcacagcgcgtgtctcccagcacatctttcgttttcgtgtgatgacggtgactgagttgccggcgtgccctgaccctgctcactgtctctttgctcccacagaatctgtaccagaacaggtttttaggcctggccgccatggcgtctcctkctagaaactcccagagccgacgccggtgcaaggagccgctccgatacagctacaaccccgaccagttccacaacatggacctcaggggcggcccccacgatggcgtcaccattccccgctccaccagcgacactgacctggtcacctcggacagccgctccacgctcatggtcagcagctcctactattccatcgggcactctcaggacctggtcatccactgggacataaaggaggaagtggacgctggggactggattggcatgtacctcattggtgagtagaatgtgccaagtgtattattcataattcacttttacatatgctgtcacattttaataaactctacaatataattaaaatatacaagcaactgtgttatatgccagattctaacacactgaagaccactgttgcatgaccttgtttttctgcaaaatggacaataaggtctctcttgccatctccattccatggaagaaaatcatgagatatagcagagtcaggtgtggttaaacacaaatgtcattatcatttgcaactatagaagctcttctacttgtgaataagttaatatcaaagcctgtttttaagtctatgtgcttataagacaaagtaacaccatatgcccaaccaatgtatgtagaggtaatttcactttagtttccagcataatctttgccagctcttccaacattcttactgctttgtattcaacagacaagctgggattatactcacaggcatacaggcatggtgttggagaaagttgacttgccttactttaggtggagatttattcaaaattttgaaagttccaaagttgaaagtttactagaagaaattgttctatgtgaattttctcaggtctttgcaaacaaaacaaattatgcaaataagttggatgctgaggcaattatttttatgaaagtttcaccattcccacggattggttttgaaaatcttataattatgaaaaccaatttaaatgaaaaatgtatttcatctattttatgtgatagaatcagctgtcatggaaattgatgtgtttacccaaaagtcgagttataattgctggaaggccacaagagtcaacagattcaacamcgggtcatccgaggccaggccttctgccttcagtctgtgctctgcaacatttgcacattcagacacacaacaccggatttaacatcacagaaagtaatggattgttatgagtagtttacaacctgcacagtttttctgataaaataaaagggatcttagctgactaactagttctcagggaaatattcttgggtctcttaaaggtttttccatcagcttggttagtgcrtttataatacacacattaatgtaaagatggaggtrcataaattgttgaaatttttacacaaatagctgtgactagctgaactggatttccaaaagttaaaattcaatttatttctgaaaaaaaattgttcttgaataaaagtagatactatagattaagaacagagattgcaaaataacagcctaaagagcatttttttttttttttgagatggagttttgctcttgttgcacaggctggagttcagtggtgcgatctcagctcaccrcaacctctgcctcccgggttcaagtgattctcctgcctcagcctcccaagtagctgggattacaggcatgtgccaccacgcctggctagttttgtatttttagtacagacagggtttctccatgttggtcaggctggtctcgaactcccgacctcaggtgatccacctgccttggcttcccatagtgctgggattacaggtgtgagccactgccctcggccgcatattttgtttcatttacattgttttgttttaaatttgattgattatccacacttaaaatgtagaagtttcaagttgaaacacaactttctagcttctttcacaaaagcctccaatttggcagcctgagcctgtgataccacatggttctaatcagctggagttaagcgtctgcaccctccctagactggcctgtaaccttcagtgttgccacagtcccctcccacccattcggaccttcatcatgagtgtcttttgtttagcacttgaggcaattaggtttaggctccgaatctagggttttggtttgatttggtttggttttggttttggttttggtttgttttttggtttggttttttattgaaatggagtctcactatattgcccaggctcaaactccagggctcaagtgatccttcagcctcagcctcccaaaatgctgagattacaggcatgagccaccatgcccagcccagatctagttttgagtcaactcaagggcatcttcccgcagctggtgagtgctgatgttattcctcaagttaggtacccactggaagagaagcctgtttggggagaaggtaatgagctcaagatggaattactgagtgtggaacacctgagggacgtgcgtccacagtgagtgaatgaatgaatggttctgaagctcaaccagggatccgagctagggttgtagatttgggataacagacaccttgggggtggataagctcactctagtgttgtgtatagaaagagagcaccagatagtcacagtgagagggggcaggggagaggcagacgaggaactcaaacagaagaagaggaggtggtgaaggggcaggataaccaggagactagagagaacaaagaagagggtagtagaggagggggtgggtagccatatcaggtattacgaaactccatgaatgaataagatctggtgttaacatgacattttgactgagacaaaagtaaccacaacttatcatcctagaaccttaatttgacagtttgttattctcattgtagctacacatatatamctgtgaagttatgtaatgcaaaatgccaacactttcaacggcatagcatttcaaaaataacttccaaatccgaaattgtctgtgaatcttaaaagtcaataatgtgtaagtccttagtagcttatcttccacattttccgtgctttgccagagatcaaatcagagatctaggctgagaaatgtagagatggtgatttcatctcatctgtcatttcatgaatgaggagatgtcgaatcagtggctcccacagtcacacagctgcctcccctggctcaggactcatgctgccacaggggtagcacagcattgtggtgcagtgttgggtatgggccatggcacatccgtgtgccatcaaatgtccagcagaggccagggttgtgatgctttcagcatggtaggacttctagagctctcaaagcaaataggactgttctgacataagagggggaagatacctggatgtagagggtgaagtgtggctgctgatttatggaacccaactcttgaagaattaaagtttttcctttacatcaggcaccctattagaatctagaagagcagaagctgtataaggcacaaacagaattcttgtgtccaaagaaacaatatgaaggaaaggccacagaaggggagaaagtggcattgatttttaggagctcctctatcactttatgcttagagttcctgcttctgcaagagaatggcgcttctacatcattggcctagtagtaagaaagacaagtagattctccccatatctcccgtcccattattattgttattattattattattattattattatcattattactattattttgagatggaatctcgctctgttgcccaggctagagtacaatggcacgatcccagctcactgcaacctccgcctcccaggttcaagcgattctcctgattcagcctctcaagtagctgggattacaggcatgcaccaccacccctggctaatttttctatttttagtagagatggggtttcaccatgttggccaggctgatctcaaactcctgacctcagttgatccacccacctcggcctcccaaactcctgggattacaggcgtgatccaccgcgcctggccctgtcccattatttagtgaagtcatggtccagccacagtgggagaatcctgggagattttttcccaagatttggttgtcagaaagcatgaattactctgaaaaatggaagccatatcttttttctgatgggtgtaggagacctgggtagtatattgattctctcttttaatcagttatgggctcacttgctcattccactcttaacagcaatagcatgtttgttgtccactcttctattatagattatggcatggaaatcatagctatgatttttattttgaagacaaatccagagaaaatatattacttgtttcttaggtatgtctgtttctgtaagcttyattagacctttctgattaaaattataataatccacaaagatcctttctctattataaactgaggagcaggtggtaggattctacacaccagaagaaatgcataccactcagaaaatgtaatcttttcctgaggaacttttctgtacatgttmtgtacaaaatgtacgatgacaaaatcttgaacagtactgatgtgagctagtgcttcaagttattattaatggttttacatagtaagtgtcatagggatttgcaatagagggccctatttttggcccagattctaagmagaaatagctgcttattagatgttggacactggtctaagaccactagctgtattagctcaaggaatcctttcaacaagattttgaggtaggtacttatagtatttatcctcattttgtagtgagtgattaaataaactgcctaagatcacataataatggtagatgtaagcttcctgcctcaaaggggatgtaatattgctcccacaaagaggcttccatcatgacaagaatgcagaaaataacagcctcctggtagagagcctagagcacccattccacactgaggtggagagtgtggcttggcccacagcatccattccagttctcctctcccctccccttttctctcctcccctcccctcctctcctctcctctcccgtcccgtctcctcccctctactctcttctttcctctcatctcctgtgccttcccctagtgcagaatctggtcctctaaatttacatttcccagactcccatgcagccatgttctggatgcaaattcgattcatttagctgcacctgtgcaagatcgggaaggtgaatatgtgaaatgtggggaagcttacatctaccattactatgtgatcttaggcagtttatttaatcattcactacaaaatagggataaatactataagcacctacctcaaaatcttgttgaaaggattccttgagctaatacagctagtggtcttagaccaggctcttgggcctgtggctgctacaagcatggccttgagaaatggagcttttctgcagcagcatcctgtgtctactctctagcttcctggacaccaacaggcagtgggggtgggggcaggcagtgacctactccgcttgccactggctggtcactgtcttcgccggtggagagacagccgccatggcctggacagcagcctcctgccctccagattgcagtgactgtactgagttttcatattcagcaggtcccagggcagcccttgcgagtgaggcaaaggcatcagcctcgttggagagccagttaggcagttatcctgattccagaggccctgcctagagtccacttctccagccctgaattccctgcattaaatccctttctgcataaaatatgtagactgattttggatttctgcagctgaccctgtcaatgcagtttgattcctaagcaaagactagtaacttttctaacaactggtaacaaatgcctttggggaagggtttgacctctcagcccaggcaagaatactgactactctatttttcttgtgtgatacttgtgattaagtgttattgttagtgtgagggaaggggatgcttatcaggactaacagccagtcctttaaaatatattgtgtttaaatgtgtacagcaaaatatacttttttctcattattgtgtgtgtgtgtgtgtgtgtgtgtgtgtgtgtgtgtgtgtgtttgccatcctcgtcatcctttgctgattcttcccacctccccttcatccttttctcattcatgttcctgtggttccttgataattaacccccttttgtacattctatattctaatgaaattacctgttttcttgaataaatctccaaatatattagaaactccctgagaacatagaccgtgacttgttcaccagtgtatccccagggtttagcactatgtctggaacagaacaaagtacccaatacccattatctcatgcatgaatggacatccttcttccaggtgttattgtctataaatccctgaccstgactattaaagggaatatcccagtgatcagagtggagaaattcrgggaaatactatcccttggagaactgctataatgaggcaaatttctacctgggtgtgaaacttgttatatctctgctgaagacccagggagctaggaaaatattatgcctttttgcagaaatgaggcaattactgtaaaagatgtattatgcaatcttcatggtaacccaaacagggctgtgagcacacactgtgaataaaaagacaggcaaattttgcaaacaagcgattttccaaaggatacaaacagttcttatcggtaatgagtgttcatttgcccagtcatttttttgccagagaaggggcagcctaaaatgtgcaatccacatagcagattacaagtagrcttaccagttatctcatttagtgctcccctgtaagtactccccactttgcagatgaagaaagactatagaagtgacactattggcaaatggcacaaaaggcaagagctgggccctttggcttcaagctcagtgctttttgcacttcatctcttgtctgttttctcagtccagccagatgcagcatgtgaactgcagggtgtcaggagagaaaagggcaatcatgaaaagggctctctgcagagctggggctctgggcctgccctcaggtgcccttgcccaggttgtccctccagcccctacggtggatttggactctcaaaacttggttttccccacagcctcagatccacctagctcagattatttctggtgaagtggaaactacaagggctccatagaagatcaaggtgaaagccacatccctgtcttagtctgcactgaaagtgtggggtctggaaccaaggaggtgacaggcagcttggtattctcagatctgtcctcctcaagaatgccgcatttctctccaggcactggttttaaagagaacatcgggccgggcgcggtggctcacgcctgtaatcccagcactttgggaggccgaggcgggtggatcatgaggtcaggagatcgagaccatcctgggtaacacggtgaaaccccgtctctactaaaaatacaaaaaattagccgggcgcggtggcgggcgcctgtagtcccagctactcgggaggctgaggcaggagaatggcgtgaacccgggaagcggagcttgcagtgagccgagattgcgccactggagtccgcagtccggcctgggcgacagagcgagactccgtctcaaaaaaaaaaaaaaaagagagaacatcgataggttgcaaagtgatgagcagagaacagcaggaggtgaaagcacactgtcacccagagctcctcccaggcctcgtctcctccctcagtgctctcctgaccacccgccccccacccgccggcctccttccttgtcactctctatcacagcaccctgttcttttcctttcttttcttttcttttttttttttttttttttttttgtgagacagagtctcgctatgtaaacaggctggatatgatcttggttcactgcaaactccacctcctgggttcaagcgattctcctgcctcaacctcccaaatagctgagattataggtgcctgccaccacgcctggctaatttttgtaatttttttttttttttttggtagagacaatgtttcaccatgttggccatgctggtctcgaactgctgacctcaggtgatcttcccacctcggcctctcaaagtgctgggattacaggtgtgagccactgcaccccgcctcctttccatctcttatcacaagttacaatcaaacatttattcctttgcttagtgtttacagtctgtcttctcaattgtttgtaagctttggttcagaagagaccatactggttttgcccaacaccacagcccctgcaccttccccagcatctggcagatggttagatttcagctgctgaatgaacaatgaatgcatgagtgcatgatggatggatggataagttcatgggtgcgaccatgtataggatggtggtgatgcccaggtgggaggagagatgattcgaagtggagtccgtgagaactagaccccaaagggagattttttctttatgtctcgcccttaggctcaaatagggatcagttcatagaagctttaggaggaagattttcacactgagctttcacacatagaaaagctatttaaaagtgaagtgaaccgcgatagcagtaattatttctctgtttctggaggtgttccagaaccagctagatgatctcctgccagcagtgctatggggttgggaggcgatcccggcataaaaagcgtttggtcccaatggcgtcttggggtgcttcctgctctctgattctctggttccaggtgctttttcttctgttgagatggaagcagcatttgtatcctttgcttttcttttattcccctaaatatgctgttgactgatatgtttctctgctctgctttcttcctctgggaatatagatgaggtcttgtccgaaaactttctggactataaaaaccgtggagtcaatggttctcatcggggccagatcatctggaagatcgatgccagctcgtactttgtggaacgtgagtacctttaccattcttgtggcttggcagacatggatgaagcagaattcaactgtttcattatttgttcccgttgcactgcctccactaagaaatgggccctctaaaagagaggtgtagatttaaagagatccttaaaaagatgttcagtagtaagtggtgaggtctagggcagttggataaaagccagccaaccagcccagagggctgcccctttaataccaagaaagagttggttcctattcataagcctctggacttgggaccctttggctcaggtcccttaactttcactccatggctcctccgggggcatctccaatgtggccatagttagaccaggtcttctcaacaggcatcctaccctccagttttgcctttgcttgaccaaatccttcaaggcttcctgcccatggtcccagtctgtcagtgattttccacattttgctctgacctttggctctggccacagctcccccggagggctgtgagacattggtactaccagcctgtttctttgatttttaatctactgacatttctgaatgtataaactttctatcatatatcttatttatatgttttctaaaattttcttctgcctttgaaaataaatcattatcagagttatggcaggcttttttcatgggtccccatactggtgtatttctcattgcatgaggaaatacctaggtgggcttcgtgtgtaggtatttcctacatacgaagctcagattatgggcttgacatttgccagctgagggaatgcacagcttaccttcagtccacagctccttctcctccacttgggtatggagtgatttcatggacaaacttcttcatgcactttctggttgttagcagatgttcattcaatgtggcatgtcagaaaggaaatggagtgatctgttattccggctatccagttctcagagaaaaagatgcatggctaggaatctgaagttatccattggcatttgacttgtggtccaggaaaaactatatcctcaagtatattttgctttcattttcattcactcttattttcattcactcccttgacaaacatttttgtaagacctgctgtatttcaaggactatagatgtgaagatgaaagtcctggtgtctgtctttgaagaaacttatggtatccccgctcccggcaatgacaccaatagctctttcttgtgttggctcatgcagaatgaatagacaacgaggaaatttttatgctatcagggtgtagagggaacatgattttgtaagatatggtttctggctcttgtgtttgagataggcataataaaactcccagcaagagaatttcttttcttttttttgagacggagtttcgttcttgttgcccaggctggagtgcaatggcacaatctcggctcactgcaacctccgcctcccgggttcaagcgattctgctgactcagcctcccgcgtagctgggattacaggcacctgccaccattttttgtatttttagtagagatggggtttcagaatgctagccaggctggtctcgaactcctgacctcaggcaatccacctgccttggcctcccaaagtgctgggattacaggcgtgagccaccgcacctggccagaatttcttttctttacttatctccctggctctggcttttctcctctctaatccatgccaggcaaaatcccttaaacccaattttgctaccatctgccccaaagctccatggatcctctttcctattgcatcagctgcaatctctctgctcagctgccaagccccaacataaactcgccctcagcccacagccctacttctccatcctccccagcagacacccttcaccctggtcatgttgacctctcccattacctaacaaatagcatcattcagcataggaaatatgggcttatttggggtgtaaagatggctccagcaagtggtacctgatataaacctcctaaagttcaagaagaatggaaaggatacaaacttgcatgagtagtgattgttagacataatactcgaatgtgtgcacaaacctacaatggaagtttggtaagagaggtttttctctctcaccatgcaccaattttttccctttggcctctaattaattgagaaatagacataagaacccattttaaggtcacagtaaagtagcagttctcaatggtgctggcacaaacacaacttgaaagtttttatcttttttaagtccagaagataaatattaaggaagaggaaatcctaggtgggaatttcaatatacctgactcagattcaaagggcagtgaccacatcccataaagccacatctcttctacactttgatactatatgatctcctgactatctcctcatttgcatggcccaacacaccaaaaaatggggaatttgtgttgtaaattaatccagccctagtgccattctcttcaaagcagttttgaaagatttctgtaacatatatagaacatttcttgtatatttattccaaataaccacttcatataattgtcctcatgggcagtatgaaaacacactttaagtattattagaaatacattataggccgggcaaggtagctcacacctgtaatcccagctttgggaggccagggcaggcagattgcttgagcccaggagttcgagaccaacctgggcaatgtggaaaaaccccatctctgcagaaaattagtcacgtatgatgatgtatgcctgtagtcgcagctacttgggaggctgcggtggaagcatcacctgtaccgtggaagttgaggctgcagtgagctatgatagtgccactaaactctagcctggccactgaactccagcctgggcggcagaatgagaccctgtctcataaaacaaacacaacaacaacgacaaaaatacattataatataaaaccatctctttataatacataaacattggcataatggaatgaaagcatattcaaacttggtcaagcagcagcatcctataaaaaacaaatggcttgaccgtgcgcggtgactcatgcctataatcccagcactttgggaggcctaggtagggggatcacccgaggttagaagttcaacctagggtttcaccctggcccatatggtgaaaccccatctctgctaaaatacaaaaattagccaggcacggtggcatgagcctgtagtcccagctactcaggaggctgaggcaggagaatctcttgaaccagggaggcggaggttgcagtgagccgagatcgcaccattgcactccagtttgggcgacaagagtgaaactctatctcaaaaaagaaaaaaaaaaggcttgcagaaggcatattccaaataactgaaagttgaacactttagataatgacattgtaaaatgtttttgtgcagacttgagaagatgttggtccacaatatacctgttggactagcaatgtcccagtgttttgggaatatcaatgaaagtgcaatgggaaaggcaggtacttacattttgcaaatatatcaaactaatgtagtataatttgtcaaaaagtaaaaatttattgagacaaagcttcagtttgcaaatgattagagtattaactcaaggcacatatattaatataaataaaataagatgctataatgaattatagctttagggatctgaatgcattaaaattgtatataagatgctatataaatttacatgttatgtgaaataattagtgctttcaaaaatgtatgattgagaggtgccaaattaacaagtagggagagattggctctacgaaacgttctcatatggctatccttccctaacacatccaagcatcaaagctctcttgctataataaaaatgcagaatcccagccatgatccaaagggttacagaagcttctattatgaactaaaaataagactctttgcagtctcccggcagtaataaacacaattaatctaattggtaaattatactctcttaaaattaaaaataattttgtaaacattaaaaattggccagattttaaacattgaagtacaacagaagctcattctttctacctggggattaaattaacataataaaataaaatgaggtgtaccttttattttggtttttatttttccctttattttttccttttgttatttctttttatgagattggatgtatattgcagatgacctggagtctgcagggttctaatagcacttttctttggggataatgattcaatttagaagtaggtaattgctattgatttatacaatttttaatggtctgactaaatctgattttgaaagtaccatcaaattaggaatattttaaacaaatattttctgcactctccaaggagtaacatacctgataaaaatactaaagaaaataaagcctgaatcatttcttattctctggcataatttttctccagtgggcacctggctatttgaccatagtrtcaatggctataacatgagaactctaaagatacaaacttgaacactgacagaagacagaactggtgaaatcttaagttgacccatcctataaagtcatatgatactgtattattgtagtaactcaattatcattttttaatacatgcatttgggctccgctggcccattcagaccttcagagggagctagcacagtccttgttcattgtgtattttgtcagaatccttccaartcagggcttggattgccccagaacactgagatgaggtgatcctgaaaagaaggtatcctgtcttgatctctggccaagatctgctctgtgtacctccttgttcatccaattttagtaggaagaactgggcagtgtgtctggactgacctctgattacagcaaaaagagaccactgccaaaggggctgcccttctcccccgcccttgtgttgtcgtcactgtcgtaggcaccgcctcctcacagctgtccaggcataaatgagaaatcaggagtcattttcaacctccgtgccttgccctagtgtcctgcccccgccagtcagcaccactcatcccggatcccacctcacctcccgggtcagtcttaggctcggcctgtcttgcccctcgtttcctcgtgtggaaacctggctggatgcacacccagattgctgcacgctgtggtctcatcattccctgcacccatcagaagaacgcccctcaacctttttagcacctcattttaaaatccttttccatcatgccatctgtctcagtccgttgaggctgttataacaaaataccttacactggggaattcataaataatagaaatttatttctcaccattctaaaggctgggaagtccatgatcacagtgccaacagattctgcttctgctgagggcctgctcagcttcaaagacagtgccctcttgctgtttctgcgtaggaccagaggggccaaaggggctggggtgccccttcaacctctcttacaagggcattaatcccatttaaatcatcatcccatattttaaaaacacrcaggggctcctgatgatacataacagaaaatctaagcagccaaccttactgacagtttgtaatgactccccccttgaccatggtgaggtgaacctcacacaggtaggggctgtcgggatctgcctcctcactctgggcttcagccagtggcttctaagccagaggcagcatgatggccacggtgacttggggctcaaccccacgcccagggaggccctctggactctgagattctgtttcttcatctataaaatgaaagtgatatatgtcctccacaaggcggccccatgaagatgacctgaaaaaactcaggagaagtgcccagccatgtgtcagggacagtaagagctcagtcaacaccagaccccctgccataattagagggctgtgaattaggaattacaggtgtcactctgagaggaaacagggcaggatcgtacatccaccttttatttctgctctggaaatgaacatattggtgtcttggtgacaattgagacatgaatggctttatgctgagagttttctgtggggaaaccctctgctctgcagccaaagctggagaccaaagggcactggaggaaaagcagggctccaggggagccggtggccttctctcccttgacattcagagcaatgtttccctgcggcgaagcagccagagccagaacaagctcgctgggaccagaggcaccagcaccaagactagacacaggggcttcatcaggccacagtccagatggttaaggtgacatgttgttagagccttttatttcaacttgggcatgttttcaccaggactgctctgcctttagagccagtgtggctaaggactgcaccgcgggctgccattttcaatcactgttgtgttatttccaaggagatgtctcaatctgtgctacaataaatacttgggccataggcgctaagcccttaagaaggttaagtctacatgaggagactgaaccccacctgtgcaacgtaaaggtgtgatcattgcactgcttcacaggttttctgttaggaaaaagtatgactccatatacatatctgcaagataataggcgtatttatattattgtgccatctgatttttttatagagctccgtggaaaccaagactccccccaccgctgcccacccactttagcactacgctaaattgaaatcatggttaaaattgcactgtgtaacggtcgtgaagtaattcgtgttgcttatattcttacttgtgtttcttaaattttaggaaaataatatagagttcacagtgatactcctgaaattctttttatcctttcaccacacaattaattcccctccctgctgtccctaccacctaaacttctccataaacctacctctggttatacctcgtactcatgttggtcttcccttcgttatttccttccagttttgctttaaaatcccaaaagaattaatcttgctagagaggcatcccctgggtagaggaaggagcccaagctaccaagtccataggcactctctagcagccccaagtgaaagggttggaaatattcatacagtgataattttgtccctttgaggttatcatgcatcatgtgatatcatatattagatattatgcatcctgtgtgctaatgggatgtagaaagaacataatagtgattaaagagcaagattaaaggcacggcagggtggagctgagaagtacaggaaagataagtgcttagactttatgtagtctatgaaccatttatattattattattattattattattattatcattattattttagttttaggatgacatgataaaacggatttggggccaggcatagtggctcacacctataatcgtagcattttgggaggaagtggcggaaggatcactagagcccaggagctcaagaccagcctgggcaacaaagtgagacctccatctctacaaaaaataaaaatttaaaaatgttagctctgtttggtggcatgcaccagtagacccagctacttgggaagctgrgatgggagaatcacttgagctggggaggtctgcagtctagcctgagctatggagcaagaccttgtctcaaattaaaaacaaaaaacaaaaaacaaaaaaaacaagggtttgtgactattcgtgcaaggcaacttcagggaaacatatccaccttcagcaatcccagtcaaggcctgcaacatgggacacagaagaagcagtgaactagaggggctgcggttgctgctggtccctgtctgaactgcatggggctgccagaggccaatctgactgaacacggccaatgagacaatggcgtgtggcagtggagggcccagcccacgtgggaagacaagacgcaggcgtgcagtcacttctcagcacatcaaggattccattgcatctgggggacatcaaaattgacctgcagtgcatggaggtctcagtccctcagattaaataacaaagcatgactgagcgttattacagaaaacagccagaaagatataaccggaacattccattcagattcgcagcaatacaaaacgatggtgccggcttccagtcagatacatgtcagatcttcccaatgagaagaaaacactcaatcgacataaataaagggtcaaggccctattaacccaaagtcacacttttctggattaaccttaagttgccaagtcggtgtgagaacataacagatacagctgtctctcttagccctattgtgctggaggcctgctggggatcgtgctggtctccaggggctcagatctagacatgcaggctccgtccctgcatgccraggttctggcattacactggggagacaagcatgtacttctttttgtgctttgtgtgaaatagtaagaggaggagccctagcctgaccttggggcaaagacctaatcacctccaagttacaggaactcggccagttgggaaggaaggtctgggctcagggccaagtggcatacaggggtgggaaggggtgaggctrgggtaggtgagacagaattggaaaagaaacattccagggaaggagcccagggtcagaggttctaggcagtttagacatatgcctgcagagcacacagagctatgcaaatgctttaagtagaaaaagcattccgattaggcttgcattctagaaactgcattctggcagaagtgtggcgagaagactgtaaggtgctgatattagaggcytgagaccaccaagaaactatggcataaaaacaggtgagaaacaaagaacacctggaatgagaaaaatggaaggggctgattcagaaagaggcttaggaggtaagatcaacatggcttggtgaggaactggatgtgtgcctggggagaggaaaggggcagaaggagaatcagctgcctctacggcacatcatccaagactgaggggtcagaaagggggcgagtttggggattgaagacaccaagttcaggctgaagtgtctgtgggctggaaagatgcagcacacagttgcccggacacggcgtgctaaggagaagaacccggctttgaaacagagatgggaaaggaacaagcaactgctgtgtgaagtgagggtgtgaaggactttgtgtagggggagtgtaaagtagtgtttctcaaagtgtagcctgctgaaaattgcaaggcagtcgtttacccagggtggttattagaaatgcagattccataggcaagagcctttctttttaataagcatgccatgttattctgatatgcctgtaaatgtgaagatgactgatacagactgtgagaagaggagagttgaggacggaattccatcgaggagcaagaggaagaagaagagaaagagagatcatggagttaggcaggttaagggtggccataaattccctgatgctcctcctattgagaggcggggtccatgtcgcctccccttgagcctgggtgggtgctgtgacctgggctggtttccaaactaaagtaccaacttccagcctaggcctcaagatattggaagcttccacttcctccctcctgggacactcactcttaaagccctgagacagctgggctgggagaagccctggctagctgtgttcggggctgtgtgacaagagcatgctggcaggcccagagyttccagccatcctcaaccaggcaagaggccacatcatacgtctagccctagctgctgtcaatggcaacagcatgtgagaaccgcaggagaactgccatgctgagcccacacctcacagaactttgagagataataagagggtgctgctgaagctgtcaagtttttggtttgatgattatacagccatagtaaccagagcaccagagaaaccatcaagagcaaggccctggaagtcaagggaggagaaaccatcaaggatgtcatcaatatgacctgctgagcgccacagagtcacagaagatacagaagtcacctgtggagggtggccatgtgggggctatgggctttgtctaaatagttcgaggagttggtgagaaagactgtaggctgaaaggtatagagtgactggttcatcctggtttgctggaactctcctggtttgggccctaatagttctgtgtcccaggaaaaagctcaggcgtgaacatgctggagtggttggtgaccctctggtgagtctgcactgataaagaagaggccaggggaatacagcagtcctgtgggatggctggcaatgacagtggctctgagaaggtaaccaaatgaggaataaaatcaaagggaagtcttttatttatttatttatttatttattttatttttttatatactttaagtcctagggtacatgtgcacaacgtgcaggtttgttacatacgtatacatgtgccatgttggtgtgctgcacccattaactcgtcgtttacattaggtatatctcctgatgctatccctccccactccccccaccccacgacaggcccccgtgtgtgatgttccccaccctgtgtccaagtgttcccattgttcaattcccacctatgagtgagaacatgtggtgtttggttttctgtccttgcgatagtttgctcagaatgatggtttctagcttcatycatgtaagatcggggtggggccaggcacagtggctcacacctgtaatcccagcactttgggaggctgaggcgggcggatcacaaggtcaggagatcgagaccatcctggctaacatggtgaaaccccatctctactaaaaaaaatacaaaaaattagccggacgtggtggtgggtgcctatagtcccagctactcgggaggctgaggctggagaatggcgtgaacccaggaggtggagtttgcagtgagccgagattgcgccactgcactccagcctgggcracagagcaagactctgtctcaaaaaaaaaaaaaagatcagggtgagcttgcacatgtttatagactgagtggaataggccataaaaatagggactctcattaacttagtgcttacaggtatcaacgttcttggcaaggatgttaccatgaggtggacgccatcactgttgtatccagtgagaaatcttattctctgagcatcatggcagcttgcctaaggttcagagtggtaggtggtggagctgggatttgaggtcaggattatctgttgtgcttcagcaccatggcagagcccatgggaatgtcagagatatgggacattgaagggcagtttgatggattgaaggccatgaggagtcagtaggcaacaggatccagagaacagttatgggacaggactttcctagaagctcttgactggctaggggtgggatgaccagaagtgtgggtgacgcaggtggcaggtgcaagatgggaacaaagagacaggaagaaatgtgtttctgctgaccattctacagtgcccgctttcctaacaagaagagaaataataagaagaaattggaagaactcaggagtgattttcatctacacagatgtggtacagtgaaattggatctctacaaaaataaataaataaataaaaagcttctcctcttcctcttcaaagccactctacatacaaaatgaatctcttttgctcaaaatcacagacacacggagctggaacctcaacccgggctgctgagaccctctaaagacttcaacaacccaaggaagggactgttaacccattttgatctccatgagatggatacagatccccaggcatgcgcacaggccacattcttgaaatggggccttgctctaaaggcctgtkgcaggtgtgtgtggcgagaggccaaatttggcaggcaagaatatggggcagacaagggacactgacctaactaagattctgtgtctggacctgcagccaggtgggtgaggcagtgtctgaagggcatggcaagctgatcaccacggtgtccaattacacagacagacacagcagatgggagcaaaggcggctgcggtcacttcaggagtgtggcctgtgctcatccctggggaacagtacatgggctgcaaggtccgacccctgggctgttgtttggggtaargctactgtcctgagtagaggaataacactaataataccagcagctaaacttctttgagccatcccaatgtacctggcatcatgctgagcaccttaaatatattgcctcatttaatccttatggaaccctagatggcagatatttttatttttcctttttgttaatgagaaacctgaggcagaggaagataattcaaccggtcccatagtcacaggtaacaaacaagtgataggactgggatgggaaccaagacagcctgccttcagagactgctctttagccaatagaccaaagtaggccagtaggggtcccatgactaaggcagaggattggtgcaaaattctggtcccatagagagctcagtactggcttatccactggatagaactttgaagtaggagtcattcctgggggccttacctccctggtatgataggcaaggaaatgtggggggcatcagagaatacagacatcactagactatcacattctaccaaaatggaggtctggaaggaagatcaaggtggttagtatacagtcttyctcatatccagatgatcccaagtggggagctcagtgtgcctcctataaaaagctgtagagaaagtcacattaaaagaaaaggcaacacaggatttcaatcgcttcctcacaggtaaatccagaatcgcccctgttttggtgcatttgttatgtatggatggattccatttgtatatgcatttataaaagtattacttattccctacaraaaatttgaggaaaagatcaaagcaaaaatcgtctataatttcaacacctagataacattttagaagagtgttttattgctagtagcatttccccttagaaggcttaataagtatgtattcaattatataatgaatgaattaagctggtgctcagtattccagtgcaggaagcatgagacttatgctgaaggacagcagccattacatcttgtctttcctatagatgcccctgagcccaaaacgttgggtttccctgctagaggaagagacagggaaatgcgggcagagggaaggggccagatggtctctgggtcagccacagggagataacagagtcaactgacctatctaccttccccttgtaataaagaggtggcagaaagttaccacctttgaaaacagaggactctgctctctgtcaaacatggcccaatccacactgggaatctgaccaaccagtttagcaactcctcctccctccactgggaccaggaaacggatgttagaaaagcagtggaaagggagaattttcactttttccactttattcctacgttatacctctctcttttaacctattgagtgtttcagccaagtcaatggttgtgcatagccacagctgtttttggtgaggacagagatctgtggagcttcagaaagtcctgcctgaacattgtgtgtgccttcctgagtactttcgcagcttctgtgcatcttatctacccaggaccaattcggaggtcactctcaggactttctgacatcagtcaagataggtctctagtcaactgcaaggccattgtcaaatggtgccagctacattgtccactccagctttcaacaaccaggaaagtgttcagagtccaaacaatacaaaaatatacaaaacctctcccaaaatgttgttaatgcagatgtctctgtctcatgtatcacacgttcccaaaattctagagtcaatatggtacctaagaatattgaaaaatccgccaacacccacaaaatttagacacaaacaacccttatccrytgcagcagctactaatctaagccttgttccttctctctaagcaaaaccagagtttgcagaacctggtacatatttagacttacattgctgttgccagctgtgttacctgaggaaagtaagcagacaaaaagcagaaaagaaaaaggagaaagtcatccttgttttattgtcattagaatgaatgtcagtctcttccaggttatccaaggcttatgaatttaaatcccaaatcagagaacccaccttagaggggagaaattgtgacattatgcttctcatatcctttggggaaaatacagttacaaatagtctaccctctaccagagaatggcatatgaaatactctatctctataccgagtctagaaatttggacctacagacacagccttttcttggaacttctgttcttttcttcatatttaccctcraaaagaagaggcttattttacaatatgaattttctataacacagaacataaatttctggtgaaaattaaacacttaaaacctgcctaacccttcaacaatgaaaaggttaagtattaaaataatatgatgaaatatttttcagaaggggaagagtagattatgtcarttctttttaaacagtcaataatagaagggaaaaggcagaaagagttcaggaacatgcagaaaaaagtagtcaaaataatccacaatcaggccttacccttactgctagcctaatcaccagcagttcccaaattagagaaaaatacatttcaggcaaactcaatataaaaaattaatattcaaatatcagaaccagttaaatggaagtctagctgcttgacacatatgaagtggttatggtgaccttacaacctcgctgctatagactaatgtttgtgagtgggccctcctaatggaattaatgcctttataaaggaggaagagacacatgatttctctccctttgctatgtgagaacacagcaagaaggcagccatctgcaaaccaggaagagagcccttagcagaaacctgatccaccagcaccttgayattgaactttccagccttcagaactgtgaggaataaatgtctgtagtttaagcaactcagtctatgatatttttatagcagtccaaaatgacttagatactcacaaaacaaattcttacaatatttggaatctttctttctttttccttccttccttcctttcctttccttccttttttatctctttccttccttcctcctttcctctctttctttctttcttttttctttcttcctttcttccttccttccatctctttccttttcttcatttttcctctttctcccttgactccctttctcccttcatctctctctttctctttctcccttcatctttctttctctctttctgtctttatctttctttctctctcctttctttctttttctttctttctttctctctccttccttcctttccctctctctctctttctctctctctccttccttcctttctctttctctttctttctttttctttctttctctctccttccttccttcctctctctttcttcccctccctttctttctttctctttctttctttcttctttctttctttctttctttctctctctctctctctctttctctctctctctctctctctctctctctctctctctctctctctctctctctctttcactctattgcccaggctggagtacagtggtgggatcatacctcactgcggcctcaagggctcaagtgatcctcctgcctcagcctcctgagtagctgggaccacactcacacaccaccatgcccagctacttaaaaaaaaattttttttagagatggggtcttactatgttatccagactagtctccaattcctggcctctagtggtccttcacctcagcctctcaaagtgctgggattacaggtgtgagccaccactcccagccaagatttggacttttgaaagaaaatccagcttccctctcaggactctgtgcagaccatgactttttcttttcttgtttattttctcttatttcattttaaattcaaggggtacatggcttgtttgttataagggtattacatgmataataatgaggattgggcttctaatctacccatcacccaaatattgaatattgaactcaataagtaatttttcaacctttatccctctcccaatctccccacttttggggtcctcagtctattatctccatctttatgctcatgtgtacccattgtttagctctcacttatacattaaagcatgtgatgcttgatttgctgtttctgagttagttcacttaagataatggcctccagctccatccacgttgctgcgaaggacatgattttatgttttatggctgtgtagtattccatggtgtatatatacattttctttatccaatcaactattggtgacacttaggttggttccatgactttgctattgtgaatagtgctgcaataaacataggagtgcagatgtctttttaattaatgatttcttttcctttgggtaggtacctagtagtgggtttgctggatctaatggtagttctatttttagttatttggaatatctccatattgttttccatagaggttgaactaatttacactcccaccaaaagtatatgagtgtccccctttctctgcaaccatgccaacatccattgttttttgactttttaaataatagccattctgactagtataatatctcactgtgattttaatttgcatttctctgatgattagtgatgttgagcatgtgtttgttgaccacttgtatttcctgttttgcaaaatgtctgttcatgccctttacccagtttttaatgtggttgtttttttcttgttgagttgtttgagtcatstgatatagactcatctctgagcctacccagacaaagatatatttgagagccccaaggtgacatctctaggtcagtcaagtggccaagagccccaaggtgacatctctaggtcagccaagtggccagtgcatgctgcaacatgttgtgggaaggcacacactatttcccaggtgttacaggatggtatgtgcatgtacttcatttctcaccttttcttctaacagtctgacactaacctgcttcatcacagcatctcagtgtcttcagatgctcttgctggatggcctctccaactcagccgaatagccaagatcattgtctcccaagaggcaacaattccagcaaattctaaacctacagacattatagtttcatgaaatcccacaccaatggagcacaatgtctttttttttatagaagacactcacttgctgtgaagrctgcatttgcagtgtcaggggccccttagaaggaacaaacatccagttcctgcaccctgaatctgaatcaactgcaactgggaraagcaactaccaattgaatatgcaccatgccagatggcctggcatatttatgtgctttgagttgccatgtcctgtgtgccagagagctaaaactggtttcaggcaactcagtcctccaccatctgaccagccaagattattctctccacttagattgaaacacagagacctactccagtgatctaggattagggacttttgtggcacagaaggcactagactcagtgatgatattactgctgctcttgtcgttggcctggkagacactgctgggataccctgcctccagcctgaatgcttgggataggcttagaaagtactcagctggttccatccaggataggggactgcagcgtcagtgctgtgtgatgccctgttttcatacttcatattcttcactcttgccttctatatccctcaccagggattttttattttattagtcttttcaaagatctaacttttgattttcttgatcctctatatatgtttgttttctgtttaattactttctgctctttattctttatcatttccttctttctactttccttggatttaatttgttgttcttttgctaatttcttgagattgctgcttagctcgttggtttgtagccattcttgtctaatgtatgcaatgagactgtcaattttcctctaagcagtttttattttgctttattttggtaaaattcttgctgaagcacaacacacacacagaaaagtgcacaaatttaagtgcagagcttatgaatttttcagaaagggaactctttcacgtaaacagcgctcaaatcaagaagcagagctttactcacattttaatctgttctgtttctcttcatccttctcacacatctgtgtttctgtctgggatcattttcctctaaaaaaaaaaaaagagttccctttagtatttcttttagtgcaatcccactggagataaatagtctcagtttttgtttgtctgaaaacatcactatttcacctatagttttgaagagtaatttcacaatatatatagcgggaactcaaagttaggtgtttttctctttagcacttasgaatgtcatttatcttctgaaaagtcaatggttagtctttttgtcattcctttgaaggtaactatcttcccccatcttatgcttctaagacttttatctttgtctttggatttcatcagtttaactatgatgtgcttaccagagcttcttgtttttatcctacggcttatcctgaagcttaatgagaagctattatcttctcaaaagttggctttaccccattctctggaactccaattacatacrgtggatcattccattgtgtccctctgttcctttttctctatgtactttctcccctttctttcctctaccttctttcaatccggatattttcagtcgacctatctcccggtttacgaaccctctttctgctctacctgatctcctgctaaacacatgcataaagttcckaatttcagctattctatttttcagtaataaaatcctcatttgattcttttctattggttttaattttctggcaaaggctgtacttaatatatccattttctatgtacatcattgcttctttaaagtctttgccagatgacttcagcatcaggattctgtttccctgcttctatctattgctgtacttggtaattttctgtcaattgccatacattgggtatgaaatattatacacttgagttactttaggtgatgacatcttctcccaaagagggtttgccatgtcctcagctaggcagttggggtgctgatggccttgtccaataagaggggagctccgcggggtgcagtccaattctggtaagccacagtctccctctggctatcccatgttccttaggacccctctcaagggctttcagtggggcccctctccctgccagatctcctcaataccaagagatggaaaattttgcctctacttttcaaatgttttcatgattagatttttagtcttttgccctcaaagcttcagtatttgtgaatgtctgaggggaaaccagttgtgtatttgagatctcctgtgctgtaactctcgccccatctagtgagccaccaggaaaaagggggtayaggttaccagaaacctctcatctagaagttttagtcctatctgagattccactgctctgcagtgcctggaaacattttgttttaaaatcagcttacttagttagctgtagaagcattcatgtgctgcaactactctatcctagcagaaagaagaagtctctaattcccaccccccaccccttttttttttctaagacggagtatcgctctgtcgcccaggctagagtacagcagagcagtctcagctcactgcaaccgctgcctcccgggttcaagcaattctcctgcttcagcctccagagtagctgggattacagtcgccagccatcacgcccagctaatttttgtatttttagtagagacgggggttcaccatattggctaggctggtctcacactcctgacctcaggtgatccacccacctcagccttccaaagtgctgggattacaggtgtgagccactgcgcccggcctctaattacctttgaactgtgcaagcaatagccccagggatcaaaaactctgtctgggggtggtgacagtaatcaacactgaaatgaaaacaaaatgcattttttgattgtttttgaatttagaaytggccccctgacacgtgaagtaagtatttcccctaaattaaagctacagtgtcgtctgttggtgggagtgtaaactagttcaaccattgtggaagacagtgtggcgattcctcaaggatctagaactagaaataccatttgatcccctgatcccattactgggtatatacccaaaggattataaatcatgctactataaagacacatgcacacgtatgtttattgtggcaatactcacaatagcaaagacttggaaccaacccaaatgtccatcaatgatagagtggattaagaaaatgtggcacatatacaccatggaatactatgcagccataaaaaaggatgagttcatgtcctttgcagggacwtggatgaagctggaaaacatcattctcagcaaactatcacaaggacagaaaaccaaacactgcatgttctcactcataggtgggaattgaacaatgagaacacttggacacagggcagggaatatcacaccccagggtctgtcatagggttggggggcagggggagggatagcattaggtgaaatatctaatgtaaatgatgagttgatgggtgcagcaaactaacattgcacatgtataactatgtaacaaacctgcacattgtgcacatgtaccctagaacttacagtattataaataaataaataaataaataaataaataaataaataaatagttacagtgtcattttacatattggttcgttttggtcacttttgctatgctatcgtatttaaagacattaacatgggatttattcttctaaataacaaattagtcaagtaatatacagttactcatgtaaaaaatatatrtcagctatcacaattacttcaaaaagaagttgcaattaaccatttttcattcacataaccagacagctcagaatttagctattagagaagcatgagtttatcacgtggcaatttgtataagttaggcaaatgtgaaattcttaaaaatacaaacatctactgtttattaaacatttatgacttttccagttattttaaaattaatttaattttagtttagttttagttaatataaccagtccgtaatacagcattctaaatcatgatgacttttggaagtacaaatccaagttagatgatacctgtatcaaattataaaattttgactgtcaatatgacattctgtaatacaataagattttttctgttagagccatatattactttaatgataattttactacaaaaatatcatttgagtagcaaaaatatcatgactttcagggctgtttatagtagagcaagggtttgttgttgttttggtgcaatttaatatggctttaaaaattatgtaattttatccctttgaatgagttcttagatacaagttgctaaaattaaatgcagcaggacaagtatgtataaaagatgactgtttcattctggtgttggttaaaaaccagactcacgcctgaaaagctttaacattttaccttaaggagattcaacaggtaatatcagtttttaaattaacataaattttccagtgtttactatgaatatttacacttagagtggaatcatcaatgttagatgcctcgtcaatgaacattatttccatttatcctcatttatttggaaacccttcacccttcctttgttttgatcaaaagtcacagcctttctctaagctgcttatttcttaaaatccatttaattcataaaaagaaatacaaatggatatactgccatataggatagactggcaggactcaaggttttatacaattaatgttgattatttctctaaaagtacwgctcttattgtttcctcttgctgaaactaaacactcttcagactcaatttatatcacattattctactgttacttaatctttttgagcatctgaagacattgtactttccattcctccttctagataactcttgaggctaactcttacagagtaattatagcttttttggttaaaattgcttttcttggggtttgaggatatagtctcacatctattttgtaaatgacatattagcagatttaagttcattattcttaagaatgtttatacatagaggccgggcatggtggctcacgcctgtaatcctggcactttgggaggcgcargcaggcagatcatgaggtcaggagatcgagaccatcctggctaacacagggaaaccctgtctctactaaagatacaaaaagtcagctggtcgtagtggcaggcatctgtagtcccagctactcaggaggctgaggcaggagaatggcatgaacctgggaggtggagctggcagtgagccaagatgcaccactgcactccagcgtgggagacagagcaagactccatctcaaaagaaaaaaaaaaatgtttctacgtagataatttgatcctttctgcaaaataagtgacttcacaatggaaggctgtgctgatctatctctgtctaattcatcaactctgattatactctggttcataagatctcagtgtttttgcattgcagatattgtaacacctgagtagctaaaaacttgccatgatgttcagatattcacggtgctggcaaactgcaatgtctgggcaacagtattcttttttttttttttaattatactttaagttctagggtacatgtgcacaacgtgcaggtttgttacataggtgtacatgtgccatgatggtttgctgcacccatcaactcgtcatttacattaggtatttctcctaatgctatccctcaccctgccccccaaccctatgacagacgtgtgtgatattccctgccctgtgtccaagtgttctcattgttcaattcccacctacgagtgagaacatgcagtgtttggttttctgtccttgcaatagtttgctgagaatgatgttttccagcttcatccatgtccctgcaaaggacatgaactcatccttttttatggctgcatagtattccatggtgtatatgtgccacattttcttaatccactctatcattgatggacatttgggttggtttcaagtctttgctattgtgaatagtgccgcaataaaaatacgtgtgcatgtgtctttatagtagcatgatttataatcctttgggtatatacccagtaatggggtcaaatggtatttctagttctagatccttgaggaatcccacactgtctccacaatggttgaattagtttacactcccaccaacagtgtaaaagcgttcctatttctccacatcctctccagcatctgttgtttcctgaccttttaatgatcgccattctaactggtgtgagatggtgtctcattgtggttttgatttgcatttctctgatgaccagtgatgaagagcatttcttcgtgtgtctgttggctgcataaatgtcttcttttgagaagtgtctgttcatatcctttgcccactttttgatggggttgtttggtttttttcttgtaaatttgtttaagttcttggtagattctggatattagccctttgtcagatgggtagattgcagaacttttctcccattctgtaggttgcctgttcactctgatggtagtttcttttgctgtgcagaatctctttagtttaattagatcccatttgcctattttggcttttcttgccattgcttttggtgttttagtcatgaagtcctctggacaacagtattcttaaagcatatttttatgttgacagatatctcctttcagcactttgaagttctcattcccttgtcttccattgtttctgtttgtgttaagaagtcgtctgtcaatatgactcttgctcctttgaaggtaagctagctttttccttcattggatgatgatgttgtttttgtctttttttttttctctgatgtctgattgctttgttccttttggattcatagggctttttgaatctataccttgatgtctttcgatgtagcaccatcatctctctgctgtccttttagatttcagttacctatattttagactatctgctagtatcctgtgtgtttcttgctctttcgtctatattttccatccttttcctctgcatgcttctttctgggtttttttctgacctatattccagttccttaaaatttctcctctatgttgtttaatctactgttaaacctattcattgagttcactatttcaaagtacagtttatcagaatttctcggattcaaaatttctgtttggttcattttgtagacttaattctttgctagtartttcratcttgtcttctttttgctcgagtgttttaagtatatgttcagtgacatctacttgttttttgtttttaatttagaaaggggactttattttgtataagggtttatagtctgcagggtggccattccacaggctgtgaagtatagactccgctcagcaaagactggaaacaggcactttaagggaggagagagcagaagaggaacttatgttgaacaggttggccaagtatacatatttaatgggttatagcaggagttatgaatattcacaaaggggttcctgaaatatgcatattgaaaaacatgtatgtaacatwcaacccaagttaacattagggtagagacttaacatttaaatgaattactattaggccgtatacatcaaaagctaaagcagggacatggaggcactcaggtgtgcagcctctgtaaacaagccagaaccagtctatggttggcaatctcttatcagaagaaagttactgaaatcattctcttttatggttttttatttttmtttttattattttattttattttccataagttattggggtacaagtggtatttggttacatgagtaagttctttagtggtgatttgtgagattttgatgtacccatcacccatgtatacaccacaacatacctgtagtcttttatccctcgctcccctctcactcttccccacaagtccccaaagtccattgtatcattcttatgcctttgtgtcctcatagctcagctcccacatatcagtgagaacatgcaatgtttgattttcccttcctgagttacattatacttagaataatagtctccagcctcatccagatcactgcaaatgttaattcattcatttttatggttgtgtagtattccatcwtatatatatatacacacacacacacacacacacacatcatatatatatacacacacatcatatatatatatacacacacacacactacagccacttgttgattgatgggcatttgggttgcttgcacrattttgcaattgtgaattgtgctgctataaacatgcctgtgcaagtatctttttcaaataatgacttcttttcctctgggtagatgcccagtagtgggattgctggatcaaatggtagttctatttttagttctttaaggaattgccacactgttttccatagtggctgtactagtttacattcccaccagcagtgtagaagtgttccctgttcaccacatccacgccaacatctactgtttttttattttttttattatggccattcttgcaggagtaaggtggtatcacattgtggttttgatttgcatttccctgataattagtgatgttgagtattttttcatatgtttgttggccatttgtatatcttcttttgagaattgtctattcacgtccttagcccactttttgatgggattgtttgtttttttcttactgatttgagtttgttgtagattctggctattagtcctttgtcagatgtatagattgtgaagattttctcccaatatgtgggttgtatgtttattctcctgactgttccttstgccatgcaaaagctcttcagtttaattaggtcctaggtatttatctttgtttttattgcwtttgcttttgggttcttggtcgtgaaatccttgcctaagccaatgtctagaaagttttttcaatgttatcttctagaatttttatagtttcaggtcttaggtttaagtccttaatatatcttgagttgatttttgtataaggtgagatgtgaggatccagtttcattctcctacatgaggctagccaattatcccagcaccatttgttgaaaagggcatcctttccccactttatgtttttgtttgctttgtggaagatcagttggctgtaagtatttgggtttatttctgggttctctattctgttccactagtctatgtgcctatttttataccagtaccatgctgttttggtgactatggccttatagtatagcttgaaatcaggtagtatgatgcctcccagatttgttctttttgcttaatcttgcattggctatgtgggctcttttctggttccatatgaattttagaattgtgtcttctaatgctgtgaagaatgatggtggtattctgaaggggattgcattgaatttgtagattgcttttggcagtgtggtcattttcacaatattgattctacccatccatgagcttgggatgtgtttccatttgtttgtgtcatctgtgatttctttcagtagtgttttgcacttttctttgtagaggtctttcaactccttggttaggtatattcctaaggttttttaaattttttaaaatttaatttaatttaatttttttttgcagctattgtaaaaggggttgagttcttgatttgattctctgcttggttgctgttgatgtatagaagaggtactgatttgtgtacattaatcttgtatccagaaactttgctgaattcttttatcagttctaggagctttctggaggagtccttagggttttcaaggtaaacgatcatatcatcagcaaacagtgacagtttgacttcctctttactgctttggatgccctttatttctttctcttgtctgattgctctggctaggacttccagtaccatgttgaagaggagtggtgagagtggtcatccttgttttattccagttctcggagggactgctttcaacttttccccattcagtattttgttggctgtgggtttgtcatagatggcttttattgcactaaggtatgttccttctrtgacgattttcctgaaagttttaatcataaatgytggattttgtcaaatgctttctctgtatctattgagatgatcatgtgattttgttttcaattctgtttatgtggtatatcacatttattgacttgcatatgtyaaaccatccctacatccctcttataaaacccatttgatcatggtggattatctttttgatatattgttggattcatttagmtactattttgttaaagattttagcatctatgttcatcaaggacatcggtatgtagttttcttttttggttaagtcctttcctggttttggtattagggtaatgctggcttcacagaatgaattagagagggttccttctttctctatcttgtggaatagtgtcaaaagtaccaattcwtctttcaatgtctggtagaattttgctgtgaatctgtctggtcctggacttttttttgtttgtaatttttwaattaccattttaatctcactgcttgttattggtctgctcagggtatctaattcttcttgatttaagctaagagggctgtatttttccaggaatttatccatttcttctaagttttctagtttatgtgcataaaggtgttcatactagccttgaatagtcttttgtatttctgtggtatcagttgtaatatctcctgtttcatttcttagtaaggttatttgaatattctctcttcttttcttggttaatcttgctaatggtctgtcaattttatttatcttttcaaagaaccagcttttgttttcatttatcttttgtaattttttttttgtttcaatttcatttagttctgctctgatcttggttatttcctttcttctgctgggtttgggtttggtttgttcttgtttctctaattccttgagatatgacttaaactgtctgtgctctttcagactttttgatgtcggcatttagggctgtgaactttcctcttagcaccacctttgctgtatcccagaggttttgatagtttgtgtcattattgtcattcagttcaaagaatattttaatttccatcttgatttcgtttttgaccagtgctcattcaggagcagtttatttaatttccatgtatttgcatggttttaaaggttccttttggagttgatttccagtttcattacactgtggtctgagagagtgcttgatataatttcagttttcttaaatttattgaggctcattttatggcctatcatatgatctatcttggagaaagttccatgcactgttgaatagaatgtgtgttctgtgtttgttgaatgaaatgttcttttttttcttcgtttttgtttttgttttgttttgttttgttttttgagacggaattttgctctggttgcccaggctggaatgcaatggcgcactctcggctcactgcaacctttgcctcccaggttcaagtgattctcctgcctcagcctaccgartagttgggattacaggcatgygccaccacgcccggctaattttgtatttttagtagagacggggtttctccatgttgattaggccggtctcaaactcctgacctcaagtcatctgcctgcctcggcctcccaaagtgctgggattacaagtgtgagccactgcacccggcctgttggatgaaatgttctatgtctatctgttaagtgcatttgttccaaggtatagtttaagtccattgtttctttgttgacttcctgtcttaatgacctgtctagtgctgtcagtgaagtattkaagttcccccactaytattatgttgctgtctatatcatttcttaggtctattagtaattgttttataaatttgggagctccagtgttaggtgcatgtatgtttaggattgtgatattttcctttggacaaggtcttttacccttacatactgtccctctttgtctcttttaaacactggtgctttaaagtttgttttgtcttatataataatagctacccctgctcacttttggtgtccatttgcatgaaatgccttttttcacccctttactttatgtgagtccttatgtgttagttgagtctcctgaaggcagcagatagttggttggtgagttatccattctgcggttctgtatcttttaagtggggaatttaggccatttacattcaatgtaagtatcgaaatatgaggtaccattgctttcatcatgttctttgttgcctgtgtactttgtttttgtttttatgctttttaaattgtatttttgttttataggtcctgtgtgatttatgctttaaagaggttctgttttgacgtgttttcaggatttgtttcaagatttagagctccttttagcagttcttgtagtggtggtttggtaatggcaaattctctcagcatttgtttgtctgaaagagactatatctttccttcatatatgatgcttagtttcgctagatacaaaattcttggctgataattgttttgtttgaggaggctgaagatagagccccaatcccttctagcttgtagggtttctgctgagaaatctgctgtcaatctgatacgttttcctttatagtttacctggtgcttctatctcacagmccttaagattctttccttcatcttaactttagataacctgatgacagtgtgcctaggggaagatmtttttgtggttaatttcccaggtgttctttgtgcttcttgtatttggctgtctaggtctcttgcaaggccagggaagttttcctcaattattcccccaaatgttttccaggcttttagaattctattcttcctcaggaatatcgtttatatttaggtttggtcatttaacataatcccagactccttggaggctttgttcatgttttcttactctttttcctttgtctttgttagattgggttaattcaaagaccttgtcttcaagctctgaatttctttcttctacttgttcagttctattgctgtgactttccagagcatttcacatttctaaaagtgtgtccaaagtttcctgaattgtttattgtttttttctttaagctatctatttccatgactatttctccctttacttcttgtatcattttttggatttccttgcattgggcttcgcccttctgtggtccctccctgattagcataataactaacctcctgaattctttttcaggtaaatcagggatttcttcttggtttggatccattgctggtgmactagtgtgatttttgggaggcattgacaagacttgttttatcatattaccagggttggtgttttctggttccttttcatttgggtaggctctatcagagggaaggtctagggctgaaggctgttgttcagattcttttgcctctggggtgttcccttgaattagtactgtccccttttcctacggtgtggcttcctgtgagccaaactgcagtgattgttgtctttcttctgggtctagccacccagcgagtctacctgcctccaggctgttactgggggttatctgcacagagtcctgtgatgtgaaccatctataggtctctcagccatgaataccagtgcctgttctggtggaggtggcagagggtgcaatggactccataggggtccttggctttggttgttcaatgctctatttttgtactggttggcctcctaccaggaggtggcactttccagagagtttcggctgtagtagtatgcagagggaccagtggtgggcgatgccttagaactctcaagattatatgccctttatcttccactaccagggtgggtagggaaggaccaccaggtgggggcagggctagacgtgtctgagctcagacttttagggcaggtcttgctgtggctgctgtgggggatgggggtgagattcccaggagtgacatctacttgttatggaacatatgcctgtatctgatgactctgatatctggaaattctatgtatctgccttttctttgtcagctgttttttttctttcttctttttttttttttttttttacattgccttgtctttgcatgtgcttggtcaattttaattaagaacagtacaatgtaaatgaaaacttgtagaaatcagatgaggcttagaatgatgctactttcctcctgaggggttttacattttcttctgaccaatgtctagcaatccagaataacctcaattgaatttcaaggcttgagatgattcagagggctaaggctggtgtatttctcaacagtatatccgtttattattcagagtcccaccttgaatcgtaagggaattaccagagctttcctttttgacaggctttagatttttaagttttatccccttaacccggcaaacctgtcaaatattcttttcagcttctcagcctctcagatgcttcttttagaatcaacacacttacccctagagaaacaaccccaaatcctgggcttatctctgagttttcatgttctgtatcttgacctcattattttattttccactgccttgctaggtctctgatgccttcaggctagggtttctagatctaggggaaaaaactttcaggacatctaattaaatttgaatttaaaataaacaatgaataatatttttattgtatgtgtattccatgcaataatcgaaacttgcttatactaaaaattcattctttgtttatctgaaattcaattttaactgggtgtcctgtatttgatttggtaaccctacttttggcagaattatttctacattttaacagcttttctagatgttctctgaattacctagtacattattactgaaagtggaagtttacttctgttagctggtcagcaaacttgagttattaaaaacttttgagagacaaatcaccaagaaaggagttaatgtttgcttaaatcctaggtctgccatgaaccatatgtgtgaccttatgtaagtggccttaattttgacctcattttccttagatgtaaaataagaatgacakgtgacatttactgaggtctgattatatgccaagcattgtgctaaacacatttttttaagaaggctaataatgattggctatacatcataggattcttgtgaggatcaaattagaaaatattattaatgccctggtacatagtaagtgctaattaactgttaagacaaatttaagtcattgcttttaaacttaattgaacattttacttactcaggtctcctatcatcattgcatactgatgtctccagtgctacagctggcctactaatcccttaacagtgtaggaaggtgggggggcagggaagcaattttctcctttctttaagtggtaataaactgaagtgaaacaatctgtactctctgaatacatgcccttaaataaagattatagttgcaatctgtgtataaatatacatatttatagtggtagaaacttcagttttgctctacttcgtgaaggacatggtcaccccggcccaaacttgaaaatataaatatatatatattattgatgcatgtgttttaatatttatggatggctttcatttgtagcccacccctaaataagaagaaacgttaatgatttaatatcccttttcagctagaatgggaaatcattttaaattacagggatatttaggttaaataaaaggaagatcaatttataatcaagttgctaaacactggaacatagtattaaaatactcgtttaagaaaaaggaaaacaacctttgccaacaacttctcagaagagtaccatgacgtccatttccaaaagggtagtatagaggcaagmtggcttcacttccccccacagaaaatttaaaacaattgtatggcaccaagatgatcaccagcaatatcccagaactcaaatatgagggtaagacagctctcagggccacaaagcagtgaaaaaaactctgagcagatggtaagagaatcagacttccatatccacaatgcccctccctcccctcaatctacctggcaccaagtgcatggaaaatttttccccaactcatgatttatacactggaaaaagtgaaatggaggtagacaaccagcttccacatcattttgggttccctgggaggagacttgtccctgcctcaacccacgagaagcattgggagtgcctgaagagagaactatccctgagagcaaccatagacaaagcaaggaagaaagaccaccacccctggaaactctgagatatagctcagccaaaggagacactaaatcagagtgagtgttcagcagcaccatgccgtggaaagcttgttccatagatccccttggcatgagcccttagccagtttttccatagtcctgggataamccttttgggacctcctccrttcaggatgggcagcaatctgattgtttactagaagtgaggcaaacctgggtttaatgtgccatctagtgtcaaaaaggaggcaattatttatagtaggggaaaaaaaagaaagatatcaacaggtaaattacaaagaatctctacacaaacatatccaataataaaaaaaaaaaaaggccagacagagaagactgaaataaataactaatccttcaatgcaaagacatagctgtrtatctacaagaaaaacagcaaacagaaaaccatgacctcctcaagtgggcaaagaaaggaactagtgattgaccccaatgagacagcaatacgtgtactctctaacaactgaaaaatagcagttttaaacaaactcagcgatctccaagataagacagaaaaagcaattcagaaatttatcaaggaaatttaacaaagagattgaaataattttaaaaataaaacaaatcttggaactgagaaatatatttgctgaagtgaaaaatttattacacgttctcaacagcagactgaatcaaacagagaaaagaatcagtgagctcaaagagaggctatttgaaaatacgcagaggagaaaaaagaaaaaacaataaaaaggaacaaagatcacctacaagacatagaaaattacctcaaaagaccaaatctaagaattattggtgttcaaaaggaattgagcaacagcaaggagaaaatttattcaaagaaataataacagaacacttcccaaaacttgagaaagaggtatatatccatccagatacagaaagatcatagaacaccaaacagattcaactcaaataaggctatcccacagcatataataatcaaactttcaaaggtcaaggacaaagatggcatcttaaaagcagcaagagaataaaagcaaagaacatataaaggaactccagttcatcaggcagcagacttcttaatggaaaccatagagaccaagagggagtgagatgacatgttccaagtgctgaaaggaaaaaaaaaaaaactgcctcccaggaattccgtatccagcaaagttatccttcaaatacagaaaagagataaattatttcccagagaaacaaaggctaaaagaattcactaccaccagacccatcatacaagaaatgcttaagagagttatttaatctgaaaaacaaaaacaaaaaacactagtgagtaaaaaggaaacgtttgaagatataaaatccactagtaaaattaagtacgcagacaaacccaggatactctaatactgtaattgtggtgtgcaatctattcatatctctagtaggaagcccaaaagataaattgatcaaaaacagtaatacctttagcaacctgttaagagataagtaatataaaaatatgtaaattgagacaatgtaaaatccaaatgttgggaggatggagttaaattatagaggcttttttttwaatttgttctttgtttctattctttgtgatctaagataagttgtcatctccttaaaataacttgttacatctataagatttttttgtaagcctcatggcaaccaaaatgcaaaacctataatagattcactaaaaataaaaagcaaaaaaacatactaccagagaaaataacttaaccacaaaggaagataggaaatatggaaaaaaggaagagagcagttaaaaaccaaccagaggccaggcacagtagctcatgcctgaaacccagcactttgggaggctgaggcaggcagatcatgaggtcaagagatcgagaccatcctggccaacatggtgaaaccctgtctctactaaaaatacaaaaattagctgggtgtggtggcgcacacctgtagtcccagctactcaggaggctgaggcaggagaatcacttgaacacaggaggcggaggttgcagtgagccaagattgcgccactgcattctagcctggcaacagagcaagactccgttaaaaaaataaataaaatgaaataaaaaacagaaaacaagcaacaaaatggcagtaatcagtccttacttatcaataataataacaaatataaatatgctcaattctctaattaaaagggatagagtggctgagttaataaagaaacaagacccaactatatgctgcctataagaaacccacttcagctataaagacacatatagactgaaagtattgaggtggaaaaagatattccatgcaactagaaaccataaagggcaagagtacctatgcttacatcagataaaatagactacaaatcaaagactgtaaaaagagataaagaaggtcactatacaatgataaaggggtcaattcagcaagcggctatgaaaatctatgcatatctatgcacccaacaccagagctcccaaatatgtaaagcaaacattaatagatctaaaatgagagatacactacaatatgatcataataggggacttcaataccccactctccataatggccatatcattccagcaaggaaatgtaaataaactacacactgaccacatggcctaactgacatctatagaacatttcactcaactgctgcagaatacacattttttctatcaacacatggaacattcttcagaatagaccatrtattaagccacaaaataaatgtcaacaaattcaaaaaagtagaaatcttatcaagtatcttctctgaccacaaaaggaataaaacaaaatcattaacaagagaaatctcagaaactacacaaacacatggaaattaaactacatgctcctgaacaactaatggagaaattaagaaaaaagttttaaaattttttgaaacaaatcaaatagaaatacagcataccaaaatgtatgcggtatagtaaacaactcaagagcaaaaaacaatctgatttttaagtagcatcttttaaaagatgtgaatagacatttcttaaaagaagacagacaaatggccaacagatgcatgaaaaaaatgctcaacatcagtaatcatcagggaaatgcaaatcaaaaccacaatgagttatcattcaccccaattaaaacaggacagggagcaacaaatgctggtgagaacacagaaaaaggggagccctcatacactgctggtgggaatgtaaattagtacagccactatgaaaaactaacagattcctcaaaaaattaaaaatagaactaccatatgacccagcaattccattacagggtatatagcaaaagaaaggaaatcaatatatcgaagagatacctgcactcccatgtttattgcagtactgatcacaacagtcaaaatatggaatcaatctaagtacccattaatagatgagtggataaagaaaatgtggtatgtaatagtattcagtcacaaaaaagaatggaattctgtcatttgcagtaacatggatggaactggaggtcattatgttaagtgaaataagccaagcacagaaagataaatattgcatgttttcattcgtatgtgggagctaacaaagyggatctcatggagattgagagtagattggtggttaccagagaccaagaaaggtagaaggaagaagaagatgaatagagattgattaatgggtacaaatatacagtttgatagaagaaataaaatctagtgtttgatasatcaatagagtgactgtaatttataataatttataatttgtaatttataatatgtttttatatatttatatgtatttataatatgtttccaaatggctacaataattcaaatgtctctagcacaaaaaaagacaaataattaagatgatgtatatcccaattacattcatttgatctttacaaattatatgaatgtattcaatcatcacatgtatcctgaaaatatgtacatctattatgtatcaataaaaaactataaatggaagaaacaaagaagagtacagagtttgaagtgttccatgaattcttggctcaaaatatgcactgatcttttcatctagcaatagagttcaatgcaagattgtatgtaatttccctgacctttttgctcaaaggcattgaaataattttttctttaaatggaaatctagtagtgcccgtttgggattcctggtacctaaaattcctttccacccaactgagatgaaggtgaggccatttggcccctccatgctgatcccaccggcacctacaggcagagtaactcatgcactaggcaacactaactcattgtgattaactagatagatggcttactgctttattcagagtccttccctgatccctgacttatgggaaacttgcctctcaggccaacacagtattggatctgagtgtgtagacctaacatggggacaactttgaggtgtcttggagaataagtacagaactgggttataagattgtccaccaagagcttgaaaagacaatcaacagacatgtgaaagaactatcgagaaagtgactcaggaaggaaactcaaagtacaggcatatctgaagtaagaacacatccactaacagagggactggttagcatccaggcatcacccaggtaatggaaaacctgagcaactgcaattaaatggcttcaaaaaaatttaaatagctgattaaaatttaatgaaaaagtttaaccctactaataatcaaataaatgaaacaaaaataataatcggattctattttaagcctatttttaagtgatgatgctcagtgctaacaagcgttctatgagatggtcagagtcacatttcctgatagaagtgtaaagtgttrtttggaaagcaatttggccccaggaagggaggatccttaaaatatattcttttttttttttttttttttttttgagrctgagtcttgctctgttgcccaggctggagtgcaatggcgtgatcttggctcactgccacctccacctcccgggttccagcaattctcctgcttcagccttccgaagtagctgggattgcaggagtgcaccaccacgcccagctaatttttgtatttttagtagagatgaggtttcaccatgttggccaggctgatctcaaactcctgaccacaaatgatccacccaccycggcctcccaaagtgttgggattacaggcgtgagccaccgtgcccggcccatatcttttaacctaaagaagactactgtaatattcgtatctacagcattgaggaaacctttacatatcagttaggtttatgtttagctacatataacagagatcctaaaataacaatggtaaactgcataggtgttattctgccagggaggctgcaaaatgtagtactttagctggacattatcaatcaaaataaaactgagattctgttattaaggaggaaaggtagaatggatgycgggtaggtatctagcgatttttgctccattgtcctagggagaaaatttgaacttaaaaaataatttgtaaaaagtaattgattttcagagaaaagcctgaatttccaaatataggaaatatttgcaatgtgtraatctattcagttgttctgtataataagtaatgttgtttgaggagttttaaatgatagttggccatgcttatttcataatgtcaattttttaaaaaagcaaaatgtattattctatagtttatagtctcaattatgcaaaaatctcagaagattgttatttcatttatacttatcttcatttttcgtattttccattctgagcacatttcaaatgcatgctaataaaattgtagacattatttttaaaatgataattgaaggcaaatttccatatttgagaaaaaatatctcaaattggagatttctcatattgtttcaaacaaaatataagggaccaagacatagcctggtaatttttttaaattttaagaaaacaaatcctataaacagtgaattggggaaagcaaatcaccttcaaatgaactaaactcatgttggctacasatcttgtcctctagggaactaaatgccagaaggaaaaggactgatgttgtcatttagtcatcacatcatcacaatcactaacatttactgagcacttaattgaatcgaagcacttttatttgcttaaccaacgtcttatgaagtcctattttaacagggggtacagggacttattcattgtctcacagattgtaaataatggagctgaaattcaaacccagtgtgatccccctaaactctttacattctgcttaaccatttatagaactttctttttttttttttttaaatggagtctcaccctattacccaggctggagtgcactgatgtgattataactctctgcagcmttaaagtcctgagctcaagtgatcctcctgcctcagcctcccaagtagctgggaactacagatgcgtgctaccactgccagctacatctatagaactttgaaggaaacaaattgtgatgcaaagaggttatcattgatgggtacaggagtttagaaaatatgcctctctcctatgtacttcaataacttctcaaagtctttctgcaaattaccaagatattaatcacaatgaattaaataataggacattacagaagaaacagacaggtgataggcatcyacccacctcacatcttagaactaagtgttttaaatcaatgacctctaatggggtaggatggatgctgagaagtctaaataatggacttaacttggatacaaaaatgttaaggccagaacaatttttcatgtcacagttttaagaagtcagacctgtccttgaggccacatgaggagcatcattgtcgagtgtggcctggcttgctcgtgggggaattatgttgcagttcttagagatgtcctctgtggccatagctgtctctccctgggttacaccctacttctcagtctcattttttgtttgtctttcagctgaaactaagatctgcttcaaatactaccatggagtgagtggggccctgcgagcaaccacccccagtgtcacggtcaaaaactcggcagctcctgtaagtctcatttctccgtctttggttagacctaactctggtctttcttcactttcctattttgttcttgtgygtgcgtgygtgtgtgtgtgtgtgrgtgtgtacgtgtacatacacacatatggagatatactgatagattgattatgaataaatggaaagacacctcaaaatggtcaagaggaatgagatccatagtcgaccttattaaagctcatgctacacttgtgtgttagggaggagccaagcttctttattttccttagatggccaaatgtttctaatagagacatgtgcaatcacagtgaagaagccttttctttggatcacattttttaattgtttggttttaaatatttatattttcttatgtttttatttcttttagtcttgtaaataaattaatggagtaggatttattgcctcaggttgattttagtcatagaattataacatgataggcctggaaagaccagaatctctcacccttctctgtgtataaatgaggacagtggccaaggagcctaaataatctatctcaggtcacagaactcgttgcagatccaggatttaagtcacttcttttgttccctgctgtgtggctttgctcaggcctgtggtaatagatgccatcttcctaagttacaatccagttttaatctttgtagtgcttctcacttagttcttaatgcatctgattaggctgaaatgcactgagaaatggcattccttttccttttcacataaattttaaatgaccaactggggaggctggacagaaaccagtggaggactttgtcatgctagtggaaataaaaaagactctctcttttttttttttttttttttttttttacattaaaaaaaaaacaggccaggcgcagtggctcacgcctgtaatcccaacactttgggagtccccaggcaggcggatcacttgaggtcaggagtttaagaccagcctggccaacatggtgaaacgctgtctctactaaaaatacaaaattagccaggcatggtggcaagcgcctgcaatcccagctacttgggaagctaaggcagaagaatcacttgaacccaggtgcagtgagcagagrtcgcaccactgcactccagcctgggcaacaagagtgaaactccgtctcaaaaaaaaaaaaaaaaaaaagagagagagagaaagtatttgacatgaaatatgaatgattcagaaaggactttgactccaaaaaatattccattttgctgctttgcaaatcagttctgcagcatcctgaagatgagctaattgaggccttggtagtaagcagtaaggtaagcaggcccgaggcccaaagcctggctgcctccatcctcggcaggactggacactgaactgggtttcccatcccggaactcatagcgggaagcgcagtgggaagagagggagaggcacatgtgcttttgacggcttcgctgtttttccctcactggccatgcagattggaacgtgattcctgtctgactcggacagcaatttaagtgtgagaatctagggaagtgtcctcagagtgccagaacctctcttccaggcccgttygtttgggcatccctcaaaagagggtaccccttaaaaccagacatgtcctgacacctgttagccaatcattgagggtggagtgacaactaaatcaaggtagcttagagacagctaaatcgaggcagaaaagaaaaagtgaaccagaagctagggagacagagcaggaaggcactgagcacacaacaggcagagaaggaaggaggcaggaagtggagtgaagccaattagggaaaacccttccactgcaggcctggcctcttgccaacacacagcagttcactgaatgaggcagacacaaggatcccttagcaggaatgggctgtgcccactgatgggactggcctgttggctcaaggctcgtaggggagaggagttcctcaccttcttctgctctggaatgatactgtgggtgtgttggccagccctggaattcaaattcttacctgaagcactttttcttatttaaataaagctccctagagcatttgtcgtctctgaactcagcctgctggagactccagatgttcacctgctgctcagaccagtgcaaaatgtgacacatcatcacagtgttgtgcaatgtaggcttaaaattaagcaagaggccaactgcccagaaaatggcctctaaagtatgatgtacagccccttagggcaggataaattttcaacaagcatatgctccccaagggctgccatcaccagaaacaaaggcttgtacctcagaagaggaaatgagatgcttccatcacactgttgacataaggttcagcaggtgcctgattgctactgccctgacctcatctttgtcattccacatgagctgctgctgctcatacttcaaactctggcatcttgaaatattttgacatattgctgtcaccctgatttttatctccttaatgattttgtcacacaaatcagtagacacttgggttgacacttgaatgtacatcctgcagacaacttctagtccccaagcatgtgagagctcgatcgcatagcccctctgccaccagggacaaagagagaaatcctgggctcctattgtcatggtgaaaatgagtccctggagtcccagggcagaaggcagtacacacaatcccacaggactgtattttcaygggcaattaggtttcataggagccactrggaggagccccctttgtttgatrgcgtggcacacttttcaaagctgtttatcacgcattattctagttgatgcccagcacatctgtggagagaggcaggaactacccttctggttaagtgatcatttggctatatggtgatggagcagaaccacatttcgcttatactttttgcaacccagctcagtttgggtataatctagcaactttccgggttaaataagcctttgcagtctcgtctggggacttgagcacacagtttctaaggggaaatgctgtgaggtttccctctatcaatttgttgataaacttggagtgtcaacttctaggttgaggattgctgctgctgcattcatctcttatgaagagttgctgtgtattgccattatatcatgtccccaaagtcactgagttggtctgtgacaatacgctaaacctaccattctttgaaaaggaggaacaagctgtcacatgctcctttggtgtaatcagcgctttaattttctgagcattgtatggtctcacgatgcatcaattctttttctcattgtcttgttccctctcatctttgtctttgtcccatgggcaactgttgaggtccttgtttaaaaagaggttgtcttctactcttgtctttctggggctctcatttattgtatatcagaaactatgatggatgtgcttatagagataaatgaaatataagccctgtcactgagaactcacggttactccattataaattataatactatataaagtctccagtactggagcgtgaagcctgctgtgctgatgtatagagaaagccgtgaccaggcacctgcagcagctgtgctggctgcggaggagggggcgtggcctgaggcaggcgccatgagtgggccttggccatgccttgaagacagacaggcaaggccagcagaagggatggcctgtacaaaggcacggggtgagaaatggctcaggcctggcagggaaggagacctagttgtcttaggtttaaagaatataggacttattgtccctatatatcttcctgtttttcatactttttgtgtcttattagtagcacctatcacgttttatgtctttcttttattttctgtagaaaatcactgtcaaagcaagctcttcctctccatattctggcccttgctaactcccccttgtgcattaccattacagtcttcttaaataagccccatgatatatttttctttctctgattatacatcaaaaaacagaaatcagcccatcacgacagtttgccaaagacagggtgggtaaactgtccttagcccaacacacagtccactgaaaataaccaggctgccctgctgggtctagacctgacagtgagttttcacatcctcctcttcccactctcaggcacccagccggcatcatctgtaggggctgctggagggagtgggggccctccctttgcctgccggttctcctgcagtgccggagactctgatgcagtctgaagctgttggtgtgagccaggtaagtgagagtctttcaagtcccgagcatactgctcccacacctggtttatgagaccctccctacagagcgttcacctggcagtgcagtgggcctcctccccacccactctgaggcctgggactgcggcctccagatagaaaataggtagctggggaatgactctggtagagtccaagcaatcgggaaaggccaccagcatgcagggcaggctgaggacatgacattcccaccccrtgtggggccatctactctggagtagagacttctctagatttagaggctgggtcatgtgtagtcaaagatgtatttcttatgttgtctttatcagcattaaaatgtgtggaaaacccatcaggattatgttacactggattattcttattcttacctcagattgctattgtttatttatttacttcatattctgtatcttctggctctttcaatgagaagttggaagtaaacataggaaggtcctcttcttcttccttcatgttaatctagtgcctctgcaaccaagcttttgataataactgaacagcataacattcaaagtaaagttatttgccaaagaacaaagaacggctgggtgcagtggctcacgcctgtaatcctagcactttgggaggccaaggtgagtgtatcacatgtggccaggagttcaagacaagtctggccaacatggcaaaaccccatctctataaaaaaataaaaaataaaataatattagccagcatggtggtgcatgtctgcaatcctagctacttgggaggctgaggcacaagaatcacttgaacctgggaggtagaggttgcagtgagccgagatcacaccactgcactccagcctggtcgacagagcaagactgtctcacaaaaaaaaaaaagaacaaagaacaaatttaaactatcttttcactagttcatgtttacagattcatatacttgtcagaccccctgagcagaggtaagagttgacactattctcttaaaaaaaaaggcaactcaataggacatttccacaccaatataggctaaattagcactctaaaatagggccaagattttcctcctccacatcagtctgagtctcctgcagtggacaaataattgataaataccctcccttccccaaattctaggtcattacctttggctatagtagcatttttcttggggattttaaaagtagatatttcaaaaaaaatttcaagtcataataaagcaactatggaccagctgctataggttataaaatgtcctggaaaatacttcaaccaagttagtagcattagtagcaaaaggaatccacaggttgccgactgatgggaccagctacctagaattgttagacataagccaattaatttggaagacacctcaactttataataaatggtcttgagcscttgtgcttggcagagattaaatggcaagaccaggttccaataaacatcaatcaccatgtatcttcaatattggggtgaaggtccccaaagttgccaaaggatccccttcatccagtgtgtccagatgaagtctcaattttacccttgaaatgtgtcaaaaaggagtatccaaaaactaatggagaaggagagtttgttctctgtttaattgggatggactgcattgccccagtgagatggacccaccccctgagatcccgggagagcaggcagccttacacagacctcagaaccacaggactgcccaagatgctattttctcttaattgtagttttctattcattatgttatgtaaagaactgtctctgcacaaagagggacttggggaaatttcagagtcattttcctcaactcgtaagaaaatggggctttctaaggatttagttggaattctggctttcatgatatcaccaggttcatggcactatagccatgttcttaaacttgcctcatttccagttctgattttggaaacttggccccattgtattttgggaaagtgacatggcatttattttttgacttggattttataatagcctttgtgaattgttttcctgttgccttactattacatccagaatttatttttgcagcatatcaccaatacttagctaaccagcactaaaaggaaacctcattaacaatactatgatgagacaaaattttgagacttagtccctaatattctgaaaatctgtttttaactgaagtaattctagttatgctagggaagcaagacgtctgaagaagttatacagtacaatattctatttttatttattcccttcataaatgtctgctagccttttcttagaggagaatttaagaaagcattttgatttgtaggagctatagattaaatgatacagataaaacacaataaaagtaatcttgagtgcttgagctagaattacatacatgatttatttacatgcaaaggatcaatgctgcccagacatttactagagagttttagaatgacctttttaaggggttattttacaagatcttctgactattgttaacttttaaactttgtctccattctcaaaagtcaagggtggaatagaaaaggagtttccaagggtgatataagttgatggttagatatcaacataatgtataatttattctagctgagaatccacatcacattttttctcgctgctaatctggcaaattgttttctgatgctcaaagcctcttgcctctaatcttcttttcccagaacctgcttccacttcctcagcccttctgcttccacctctccagtccatgcaacactctgcccctcaaccatggaggtctgctcagaacagttattctgggcatctttatgtagtctgtgccttcagtgtcatttatgtactcagtaaatatttgtcagtaagctccttggggctaaccattaggcatgtaaaaccaaacaagacaaatccccatgctcatcaagccacctgcctaagatacgggcaagtgtgtagcggggagacagacaagaaaacagrcaatgacagagcactattccatgcctctggaggtggacaatatagggtactttgtaaggaccaattatgggcaggcccagaacatgatgcagggttttccagaaggagtaagctgaaatgtgcacacaccacagccatgatttctgatcaagccttttatttcttgtaagcaaatttaacccagaatatagtggcagcttattcataaatgtgtctcctgcaaaagtcccttcaggttttgatcagactaatttcaggtttgatcagcagtggggacatttgtacatttgctttttgggcaaggcatcaggtggacttgcccttctagaacagaaagaaagggaagggattcggyatcctctctctagataatttacccaggccctactcacaatctctaacctctcaaagaggcattttggaagtttagattctatcctagcccaacattaaggaatctgttcagtttgaggggaagaggtccagagctcacactaacgaggcattctggggtctcaagtctggagatgctgttttctgaaacacctttcccaccagctatggttcagctgccatagtgtaggggtgggtggtttacatccttcctgtctggactctaagaagcaaaacgccaaatagcattctgtgatccccaatagttggttctaaaccttctcttcaagttgcattttctgtagaaatgacattagaaaaaatttatggaaagtggaaatggaaatcctaatggaaagtggaaatcctttctatgtttgtaagagccacattctgaaattggggtcaggacatctatgaagccctggtgtttcatgggcacatttgcacatgttgctaggaatggatccaaggcactcatcagataaacagggttcatggctccagaaagataatggacttctgtcacaggaaatataaatgtcactctttgctgacataaagagacaatttagggccgggcgcagtggctcatgcttgtaatcctagcactttgggaggccgaggcaggcagatcacctgaggtcaagagttcgagaccagcctgaccaacaaggagaaactccatctctactaaaaatacaaaatttgccgggtgtggtggcacatgcctgtaatcccagctactcgggaggctgaggcaagagaatcgcttgaactcgggaggcggaggttacggtgagccaagatcacgccattgcactccagcctgggctacaagagtgagcgaaactccgtctcaaaaaaaataaaaaaataaagagacaatttgacagtcttggtactgttaaaagtctacctttgcctttttgggagagaacaccttaatctttggcagcactatgaaagctggaattatttatttactacctaggcatttactacctgacctagaaattgtgaatgaacacatcaagataaatatattcatatgatgaatcttgacatgaatatatccagtgacctagaaaaaagaggacgtgaaaattaaatgaggacttcttaaacaaaaggcttttctcttctttctctgcagcagggtccaaatgttgacttctcagggattagaggcaaggagcttagcacagaatagacaaaacgaaatgttcactttccctaaaacaaaacgaaatggatgagttcacaggtgaagtctttcaaatgatggagggatagataaatctgatacagcttaagcttttaagagcaaaatcaactaatttacatcattaaagaaaagacaaaccatctgacaaatgggccagamcctaaagtcagtttttaggggggaaaaatgcaacggccaataaacacacaaaagatgttccatcaagagaatgagaagacaaattacagactggaagamtatatctgcaaaatacatatttgatcaagggctagtattcacaatgtaccaagaactcacgaaagtcaacaatgagaaagcaatcaagccaacttttaaaaatgggcaaaacacctggatagatatctcaccaaaaatacacaaatggaaaattagcatatgaaaagatgcccaacaatatatgtcattagagaactgcaaattaaaacaatgaggtaccaaagatacctattaaaatagccaaaatccaaacactaacaacaaaaaattctgtcaaggatatggagcaacaggaactctcattcattgctggtggaaatgcaaaatggtacagctactttggaagacaatttggttgttacttacaaaactaaacatacccttaccatatgattcagcaatctcactccttggtattcacccaacggagttgaaaacttatgtccatacaaacatcttcacatgtttacagcagctctatccataattgtcaaaacttggaggcatcttggatgcaagatgtcctttagcaggcaagcagataaattgtgctacatccaaacaatggaatattattcagtactaaaaaaaaatgagctgccaagctataaaaagacatgaggaaatcttagatgcatactactaagtgaaagaagccaatctgaaagcctacataatttcacaattcatctatatgaccttccaaacatatggagacagtaaaaaagatcagtggttgtgaagatttagcggggaaggatgaataggaggatcacagaggatttttagggcaatgaaattctttttttttttttttttgaaatggagtcttgctctgtcacccaggctggagtgcagtggcrcaatctcggcccactgcaagctccacttcctgggttctcgccattctactgcctcagcctcccgagtagctgggactacaggtgcccgccaccacrtctggctaattttttgtatttttagtagagacagggtttcaccatgttagccaggatggtctcratctcctgaccttgtgatccacccgcctcggcctcccaaagtgctgggattacaggcgtgagccaccacgcctggccaatgaaattctttaatatgatactatgatggtggctacatgttattatacatttgtcaaaacccacagaatatacaacactaacagtaaccactgatgggaagtatgcactttgggtaataatgatgtgccagggtaggctcatcaagtgtgacaaatatgccactcttatgtggaacgttggtagttggggaggctgtgcgtgtgtggggacaggggatatatgggaatgctgtgctttctgctcagttttgctgtggacctaaacctgctgtaaaataaatgaaaggctatttttttaaatgctccaatcagaaagcaaaaattcaaaagttttatggtacccagggatgataagagagtgaaagaagcatgtgtacactattgggcccatttttttcaaggcagtttagcaaaatttatcaaatktatcaaaatttatcttgggcatatttgcaaaagctatttgggatatatagacaaaattattcattgctgcattgtgggaacagcaacaacaggaaagccagtgtctccgttagggagactggatgatacactctaacggcaaaagcagcaggggagcagattgtgattatggggaaaggttctcaatacattttttgttgatggtggattttgttttgttttgagacagagtttcgttcttgttgcccaggctagagtgcaatggcacggtctcggctcactgcaacctcctcctccctggttcaagtgattctcctgcctcamcctccctagtagctgagattacaggtgcccaccaccacgccccgctaatttttttgtatttttagtagagatggggtttcaccatgttggccagtctggtcttgaactcctgacctcaggagatctgcccgtctcagcctcccaaagtgctgggattacaggtgtgagccaccaagcccggcctcaatatgttttatgaagtgcaaaagcaaggctcagagcagtgcctttaatattaccccattgatgtagtttttaattaatagttagaaaaattatttccaggaaaggataacaagaaatgagtaacagtgactacctttgaggattatgtgggggtggggtgtgcaggatttcacttatcattctgtgccttttcttttttacctgtttatatttactaacaaagggttattttcctttttttattattattatactttaagttctagggtacatgtgcacaacgtgcaggtttgttacatatgtatacatgtgccatgttggtgtgctgcacccattaactcgtcgttttcattaggtatatctcctaatgctatccctccccgctccccactgttttcctttttttagacttgtttatgttttctaacaatagatttcttttttaaaaaaatcacaggaattatcaaaatagtgggattgtggctttttgtgttttctctgttaactattttaacatctataatttttttaaataaatttttttacaaggaaaaagccttgtaaaatatttttaaattttttttaaatattcccttttctctcttctcatgastggtctggctttatctagatgctcaaacttgtagtgtcacaatttagtccttgatgcaaagggaaagaatgttggcatgtgctaatatatgagtgctaaaacggttgccaaatccctccttttccagagcaggggtcagacgctcatcaagtgatatagatgcctgtttagtctacccatcaaccccacagccattcctatgggaatgataaacagaaaagacaaaaccaatcaatactgaaacccatgatttaattaaatccagagatgaagaaagtgcttaggccagaaatggagaggaatttctgatgattataatgtcattaagatgccccaaacctggagcaggaagagatggaggcaaagcagactaayggtgctgggagtcactgcaggcatcacagtgagctctgtggtgctgcccatgcacgttggtgtcgttctgccttcttccttttttttttttttttttttctttttgagacagagtctccctctgttgctcaggctggagtgcagtggcttgatctgggctcactgcaacctctgcctcttagattcaagtgattctcctacctgaattttgtattttagtcgagatggggtttctctgttggccaggctcgtctcaaactcctgatctcaagtgatcctcctgccttggcttcccaaagtgctgggattacaggcatgagccaccatgcccggctcctttcttttctttcttttccctgtctcgctctgaaaaaagaatctcactgttttttttaaacttatttttttctttgcctgtgcctacaaatacaaatttgagtaaactgtcccttctaatggctggtatagtagatttacatgtttgtttttttttaatttttaattgtggtaaaatatacataacaaaatttaccatcataaccatttttcagcatgtagagctcagtgacactgtgtgcattcacgttgtccaaccatcatcaccgtctatctccaggacttttcatcttcccaaactgaaattctgtccccactaaacaccarctcctcattctccccatcctcggagcccttggcagcmaccatcctacttcctgtctctaggaatttgaccacactaggcacctcatataggaggaatcatacagtgtttgcccttttgtgcctggcttatttcagtgaacatagtatcttcaaggttcaaccatgttgccgcgtgtgccagaatttcctccctttttaargctgaatagtattccctagtatgtatatgctctattctgattatccattcctctgtaggaggatccacgggttgcttgatataggtatttctttgaggaaactccactggttatttggtcaggaaaattatttgttgtttcattctttgcattgaaataagttatcactcatttcatataaaaagtattctggggttcaaataaaaagaaacactacgaaaattcatagaggttggctccttttgaaataaattcaatgtaaagaaattctagaaaattacacctgttctctacatgattcaagagaacattgtatctttgaaacttcctgagagagcaaagaatggtaagaaggacagtaaggagataatgggtccaaccttttgaccaacagtcacaggtatgtgacttagagaccaygggaaaaggaattactgaattagaagacaaactaaaacaaaatcatccccaacccagtggaaacagaagatgaaaatagaactttttaaaacccagaaatctaatttatgaacaacagatgcactttgggaggccgaggcgggcggatcacgaggtcaggagatcgagaccatcccggctaaaacggtgaaaccccgtctctactaaaaatacaaaaaattagccgggcgcagtggcgggcgcctgtagtcccagctacttgggaagctgaggcaggagaatggcttgaacccgggaggcggagcttgcagtgagccgagatcccgccactgcactccagcctgggcgacagagctagactccgtctcaaaaaaaaaaaaaaaaaaaaaaaaamatagagaaatataataaccagtgaaaaaaagatgaaaatattttttatctaaaaaaatacatacctaattaaaattgaaattcttcatatttcagatagctggaattgatataataaaatatatatgtaggttcatagtagaaaatttgtagacacataaataagaaaaaacaataataatccaatacacagcaagcttctgcaactacatagtccttcttaccattcattgctctaataaagttttaaaaataaaatgttcttttgaatcatgttaagaacattgtgaaatttcctaaaatttccttcagtttcttgcattgaatttactccaaaaggagccaaggggttcctggaggaagaatttttgaactgaagaatgctataaacaaacaggagaaactgtcggacgcctggaaaatagcaaaagccaagaaaatttgaatgttctcttcacagcacaaagatgtgcttggtaagatgtctatttaaagggaaaaaaaaaatagttctctactgtaccagttgtcagtgatatgtgactatgccaaatacagacattctcaagcacgtaaaaatagagaaattgcccacatgtcaaatatacratttcaggattgcgaaaattgtggatggcagaaaccggtagtgaataaggaaactaattacttataaagagatatgctgaaatgattgcaaggatgtattattattttattacttaaatatatattgtatggcttattgcaccaattagctaaataaaaaataataaagaggtattctgtaacacttgtttttaaaaaagctccaggccaggcatggtggctcaccaataatcccagcagtttgggaggctgaagtgggcagatcacttgagaccaggagttcaaggccagcctgggcaacatggcaaaaccctgtctctacaaaaactacaaaaattagccaggcatgatagcatgtgcctgtaatcccagctactggagggactatggtgagaggattgcttgagccctggaggtcaaggctgcagtgagccatgatcaaaccattgtactccagcctgggtgacagatgagacccttctcaaaaaaaaaaaaaaaaaaggaaaaaaagctctttaaaaatcaagacttgccatggtaaagataacatttgaatgaaaaaggcagtataattactggttgaggtgcatatatataatcatatatatatatatgaaatatgtatatatatacacacatatatatacacacactattttatttttatttatatgagcttgatcatctccacataacccaataaaccaaacatatactcacctattacaatacttaaccatgaaacactagaggtttttagaattaaaattaggaccaaaataagcgtgtaagatgccaccagctctaacatttaaaaagtaaaatagtacatgttccttgggaatccatataaacagaagaaaaatgtcaccgtaataatctcaccacccaacgagcctcaggaacctgcagaaaggaagggctttttgatcatctctgactgcagagccagcaattaaaataagtatagcaagtctccctgggatgggggtagccagccagcgtctgggctatgtggattctccaggccattggacaccatgccctttactcagtaggtgcccgtgagttggcaaaagtctagctgattacatcctggtttttaaatcctaaatggcctctcaataaaaactctttgtattaacatttcactgaaggataaaaaatttcaaatatagctcggcacagtggcttacacctataatcccagcactttgggaggcctaggcaagtggatcacttgaggtcaggagttcgagatcagcctggctgacatggtgaaaccccatctccaccaaaaatataaaaaattagctgggcgtggtggcaggcgtctgtaatcccagctacttgggaggctgaggcaggacaattgcttgaacccagggggcagaggttgcagtgagccgagatcgtgccattgcactccagcctgggtgacagagcaaggactctgtctcaaaaaaaaaagacatttcaaatatatagatcttgatttcagatttgtaactttcaactccagcattcaatttagtggtcacactttagtgaaaaaaaaaagacttttcttcaggtaaaagtcttgagaaaaataaattcttacttcccaaggatctcacagagccaacatgagtaaagttagtctgacttgtaagcaggtgaatgaatgtagcacagaggcattcggacaagtcagagatgcctgggactgtgctcttcccatccctggcctcacccaacaccatgagacccagagtagggaggaaggcagcccaggcccatctcctcctccataccaactaccttttcaagcctgttctgaaggcagaatgttctaccatcagtgctttttacccttcttgctctatgaggacagggaagttcaggtcgatgaacaaatggattaactatgatcaactcatttcttttgcttcaaaacacacattaagactaacccaaggagcaaagccctcaaaatgcgcttactcaagagtttgtggttcactgtgacctcaccctgccccctcacaataattaatctcaggttctagtagagcattagatcccacttctttcaaccatctaaactaggtgaaagtgtccctggatttaaggtgctgtagattaagacaggactggtgcttttagatcaggggttttctccggtgggctgtttcctgaaagagtccaaaaaattagaatcaaatccttgcatatgaatgcacagaaataacattttttttctctttgtgagtttttcctatgttacttacagcaaagatggcagaagcccttaagttaatgaagtccccaggcatgttgccagggtgtaaaggcccttatctgtgtgctctctgccaatgggaagtcggaattatcaagcagcccttggatcaaagggaagtctgatcctggggactttcttatgcctcccccagagctatggataatttccctgcctgcattcttcactgcaactctcttttatgagaaatggctgctctggcagaacacaaagatgactgcatttccaaggaggttagtagacccttagcattaatgctcagtttatgggtacaatgtagttatacatccaaatttatacatttacacatagtcactaataaatagttgtgttttaaagagttgagtttaattggaaactacttaattttattagccaagtatataatatgtatatatgtgtgttacactttcagatttgaaaaaaagcttgcttgcttaaaattgtcaacattatatttttgtaatctagttattctaatctaatcatcttctttgtagacccttcatttctagaaatttctaagtctctttagtttgccttttattaaggacttagcaaatatgaggtgattttgctctcctgtgtacacagtgactactggatgaggagagaggagaggacttgtcaggaataggattattcaagagcaggagaatctaacttttcagagagcagcctgtaacaaagagctatctagaacaatcatgtggtttatgagcggagctctctcagataacctgccttagaaagattctgcattgtcctgtcagacatcccaaatacgcatggttaaaacccttggcactttcggccaggcatggtggctcacacctgtaattctagcactttgggaggccaaggcgggtggatcacttgaggtcgggagtttgagaccagcctggccaacatagtgaaaccccatttctactaaaaatacaaaaaattagctgagtgtggtggtgtgcacctgtaatcccagctactcaggaggctgaggcatgagaatagcttgaacccaggaggcagaggttgccatgaactgagattgcgctactgcactccagcctgggcaacagagtgagactgtctcaaaaaacaaaaataaaaacaaaagaaggaggcaatgtcaggcaagggcagagcagcaggaatgatggtgaaacagacaagactgtctcaaaaaacaaaataaaaaaccctttgcgctttgaacaggaaagaaaatagggacaacctaccttccagacatagaacatgcggtggttattgcttatgggggggcggtgtgcccttgctcacacaagcactgtgttggactaataggcataggaagttaagagcacaactgaagtaaaacaaaacccatcaccctcacctggcaaaaccccaccctcgttaaacttaattctctgtccactctttacttgcatgcaggcagcataagagtgttcctttaatcttatgaccacagatctcaagctccctttaacgctcaatcccagaagcactgcacctctctgatgtggagagaaggctgctttacacttccattttcctcacacctagagtgcccttccctctctcactgagaaatgaaggcaatcagaacacagccagcctgcctgcacacacactcccatgctgtgcctccttccagtgacaactgtctcaggccagcctctccatttgcacatgggatcccatcccatcttgtctttatgcagccttgatcctgaaagtagctcctccttctcctgcatagtccactgtcctctccgctcaatcacttccatcccattacataacgattccactcagaactctccagtggctttttcaccatcattcctgctgctctgcccttgcctgacactgcctcattctttccacctaattccagcctcgagagtcctctttctaatccttgaatacagcaagatggttcttccctcagggcccttgcacttcaggtttctctgcttgggacagttcctccaaataaataattcactccctccccccatttagatcgttttctcaaatgtcccctcctgggagaggccttacatcaccaccctatctaaactattctccacacagctctttattttctccaatcactattttcattcatggtgctcgtgttgtaattgtgtttgcctccctcctaaagggcagcctccaggggcagagatgtacctgcctgtmctcttcagagctgttccttatcacccaccagagcagtacctggcacacagcagacggcccataaaacatttgtatccaacaaacatgggttattccctggctcagccacttaataacttggtggccttgggcctcaatttctcttttgttgagacaaggtctcactctgtagcccaggctagaattcagtggtgttatcaggttcactgcaactttgacctcytgtgctcaagcaatccccctgcctcagcctcctgagtagctaggactacaggcacatgccaccacacctggctaatatttttaaaaatttttaaatttttgtagagatggagtcttgctttgttgcccacrctggtctcaaactcctgggctcaagcgattctcctgtcttgtcctcccaaagtgctgggattacaggaatgagccactgtgcccagcctctttgagtttcttttgctcaacattacttttgtaggattaatccatatcgtgctgtagtttttcattcttttgtgtgactgtaccagtttattctactgttgatggacatttgggtttagtgttgctgctatgaatatttttatacatttttttggtgaatgtatgtgattttttccccctagatgaagttttgctcttgttacctaggctaaggtgcaatggtgagatcttggctcactgcaacctccatctcctgggttcaagcgattctcctgcctcagcctccaagtagctgggattacaggcacccaccaccacactcgggtaatttttttgtatttttagtagagacagggtttcaccatgttggccaggttgatctcaaactcctgacctcaggtgatccacctgcctcggcctcctgaagtgctgggattacaggcatgagccaccaggcctggccaatatatgtaacttttgatgggtatataattagggtgaaattattaggtcatggtttatgcatatgataatttttagtagattctgctaaagttttacaaagtggttttacaaatttacacttccaccagcagtgtatgagagctccagttgttccacatccttgccaacacttgataytgtctttttatttttagttgtgaaagggtatgtagtagtattgcagtgtagctttatttgtatcttcctgatgattaatgaagtgaacattttttcatgttagggaccccaggtttattggccattggattcctgcttttgtgaagagtttgcaaaatcttttgtcctcttttcccattgggctgtttacttttttcatgctaatttgtagttctttatatattctggatatagttctttgttatatatcttctacctgtggatggcattttagaatcttggtgctgtggtgaattaaagttcttacttttatttatttatttacttcttggaggcaagagtcttgctctgttaccaaagctggagggcaatggcttgatcacagctcactgcagccttgaactcctgggctcaagcaattctcccacctttgcctcctgagtagctaggactacaggcacatgctaccatgcatggctaattttttttttttttttttgagatggagtcttgctctgtcacctaggctggagtgcagtggtgcgatatccgctcactgcaacctccacctcccgggtgattctcctgtctcctgtctcgacctctcaagtaaccaattctctctcctgtctcaacctcccaagtagctgggattacaggcatgtgccaccacacccagctaatttttgtattttcagtagagacagagtttcaccatgttggctaggctggtcgcaaactctcgacctcaggtgatctgcctgccttggcctcacaaagtgctgggattataggtgtgagccaccacacctggctgataattttttaaaaatttttttagaaatggggtttcactgtgttgcccaggctggtctcaaactcctggcctcaagcagtcctcctgccttggcctcccagagtgctctgattacaggtgtgagtcaccacacccagctgagcctcaaattctggatttataatgatatggatagaagataaaaatagaagcccctcacgcctgtagtcccagcactttgggaggccaaggcagatggatcacgaggtcaggagagcgaaaccatcctggctaacatggtgaaaccccgtctctactagaaaatacaaaaaattagctgggcatggtggtgggggcctgtagtcccagctgctcgggaggctgaggcaggagaatggcgtgaacccaggaggcggagcttgcagtgagccgagatcgcgccactgcactccagcctgggcgacagagcgagactccgtctcaaaaaagaaaaaaaaaaaaaatrgaagccccttcagaggactgtggaaagtgtgtctgaggatgcggtgaagcaatgcctgtgatgctctcagcacttgccccacatggggtaactacccagtaaaagttaattagtacygttttgtgagcttttctataatgtttctctctgggactactccagctctctggttacaaaatacatagatttcaacatcatagagaaaatgcatatttggacaacatatacaaaactggaaagtgcaaaaaataacgagttactgcctataagcaggagcttaatccctcattcaagatgtctcttttaaaggaatttactgaccctagaatagtatctgtaagatgaatagacagtggatctatcccaccagatggaaggatagatgtggggggaggggttggataaatgagtgaactgagtggatggattgcacatagttcaaaatgatgactgaaatgtggatttattatcttactttaagttctgggatacatgtgctaaacatgcaggtttgttacataggtatacatgtgccatggtggattgctgcacccatcaacccgtcatctaggttttaagccccacrtgcattaggggtttgtcctaatgctctccctccccttgtcccccaccacccaacaggccccagtgtgtgatgttcccttccctgtgtccatgtgttctcatttttcaactcccacttatgagtgagaacatgtggtgtttggttttctgttcctgtgttagtttactgagaacaatggcttctggcttcatccacgtacctgcaaaggacatgaactcattatttttttatggcagcatagtattccatggtgtatgtgtgccacattttctttatccagtctatcattgatgggtattcgggttggttccaagtctttgctattgtaaatcgtgctacaataaacataygtgtgcatgtgtctttatagtagcatgatttatgatcctttgggtatatacccagtaatgggattgctgagtcaaatggtatttctggttctagatccttgaggaattgccacactgtcttccacaatggttgaactaatttacactcccaccaatagtgtaaaaatattcctgtttctccacagcctcgccagcatctgttgtttcctgactttttaataattgccattctaactggcgtgaaatggcatctcattgtggttttgatttgcatttctctaatgaccagtgatgatgagctttttttcatatgtttattggccacataaataccttcttttgagaagcgtctgttcatatcctttgcccactttttgatagggttattttcttataaatttgttcaagttccttgtagattctggatattagcaaatatttctaagaaaatgcagttggcccttgaacaacacaggagtttagggcttccaatcccccatgcagtcaaacatttgtgtataacttttgactcccccaaaacttaaccactaacaccctgttgttaactagaagccttgccagtaacagttgattaacatattttatatgttatttgtattatataccatattcttacaataaagtaagctagagaaaaaatattaagaaagtcataaggaagagaaaatatatttgctagtcattaagtggaagtggatcatcataaaggttttcatccttgtcattacattgagtagactgaggaggaggaggaggaagaggaggagttggtcttgctgtctctgagttggtgctttgtctgcaagttttttcaaattgttgcaaactccaacatgttttcaaatatgtgtactgaaaaaattcatgtgtaagtagactcacacagttcaaacccatgttgttcaagagtcaactgtaatttgttgagaattactaccggttacttctagagcacaagtgagtgttgtcttggggttctccacgtaccccctggaaatgcagaagaaggtaggtgtgaagttcttggatgctggccagtatttaatgaaagattaattcactcatcccatgatccagcaacccatgggtagcaggaagccccaggaacacctctggagggaatgtggcagctgctgcaggaagacagagccccaagatggcggtgtgcctggggctggcagcaagctcacccttggaccttagagagcttttcctaagtatccatgtggcatgtccataggaaaaaagatgttacattagcaagaaaaaaatacgtctttgcctaaaacttaaacatatttttagatgggaatacaacttagaaattttaaagcaagtcagtgagggggaaaacgtttgcctttaaaaaaaatcattttctaggcatcttttcattcagtgaggagtaaatattatcatgtttttgccattacactcacatgaatgagccatgtccattcttctttggattatccctcaaaattgctcatctattccgtgagagggagtgggtggctggaaagagctctatgcaaaatgcagcccttgtcttcactaagcagactgtctgacccagatggaacagcaaccgacacacttcctatgatttcatttacccaaaggctttgcagtcgtttggtttaatcgctattttaaaaagtagaatcaaagcagtttctccctccaacctcacatgcttagatgaaaagagctaactcttgtcactcctgcatccttaactagacttggtgataaaggacaaaacgcagttctggaaggacaataattacaaggagtttcataatttgtaagaaaaagatcctgaattcaaagaaacgggttcagccaaaggggcatctctctttccctcaacaccctcttccaatcggtcaccaagttctatccattttatcacttggcagtctcccctctcccctcccctcccctctccccacccctcccctctcccctccccttccctctcccctcccctcccctctcccctcccctcccctctcccctcccctcccctctcccctcccctcctgcgtactgacagacagggtttgtgtcagtgtcactcagacactgttgcagctgcctccaaattagtctctctgcctctgtcttctgccctctaattttgtgattcacatccttgagtatacactggactcacctgggagccttaaagaggacagatgcccaagtcccacccacctccccacccccagtctgactcacatggtcttggtaaagcctggggcagctcctacaccatggcagagccgtccctcagagagctggggtaaggggctgatctccatgagttcatgttgcccttgctaacagaagagcaaggccaattacacagttcatggtttccagaagatgaagaccagccatagtttcccaggagaaatacaactgttgttggttctacaatcaggcagatatttctcccaaggcaaaagaatatgttgaaaatgagctttggatcatgaaggaaattgcttgaagaaggttgtattcatttcctattttgttgtgttacaaattatcacaaagttagctcgtgggtctataggtcagaagtcctggacagcatggctggattctctgctcagtctattgcaaggtaaaatacctgaaatcaatgtcagccaggctgagttctcatctggaagttctgtggaaaagcctactttcaagctcattcttgttgttggcagaattcagttccttgtggttaggacagaagtgcctgtttcctgtttccttgctgactcagccaggggccaacctgggtccttcatgccgcccayattccttaccacgtggtcccctccatcttccagcctgcaatggtgtgtcaaacccttctcaccttgaatctttgacttcctctctctctttgacctctaggcccagattgaaagartttgtgtgattcagtcagccccttataatgtccctttgttaaagtcagctatcctgattccagagtaattcacagtccctgagcacatacaccacagaggcaggaaatcttggggcccatcttagaattctgcctgctgcaaaggctcagaagggtccccctagtcatcctggtatttggaggttgaaggtggaggaggaaagagaagagccaagccatcccgactcagcccagagtttctaactacccacatgatacagaaacccactcccagggatgtgcatgagccctgaagaagcagtgctgccccagctcaaacaacttaccctacatgagctgccaacacttgcccctagatccagcgtgatgccaaagcaatcagggagatgttcctgccmcccctgcatgtttctgctgtcttctaattaaacccttccagaaattctgccccacccacttccccaccagcttcagctgtgtcacctatcatctcaagttgtragccctcatctcaggtccatggactctcaaatcagctcagatgagggaggaatgtgtccatcagttccctcatttgggccagctgaagggtgtagaagctaacagaagctcaccgcactgtgcttttattttttatttcacataaggacaggttttgtttacaaaataattaaaatagcagcttgacatgaattccttagaaaacaggatagaaacataaggccaagactacccacatattaagtcaatccagatgagtgtggcatgccaggcaacgcatttgttttcctgaggtgtgtatttcaaatagagtctggatgggcagaaacatgatccagccatttagaaggtactgaggcagcttccagaactgtgttttggtcccatcttttcctcacagcagctctttcttgtcatgaaaccatcagccctcattctcccactccctttccatctctccccaccaccaatcccattgttctccctcccctcctcacacagcccccagccagccccttcccttgggctggctttgaatggatcgaggttatggaaacggattcatcttcactcttcctgttctacctttttctaagtcttagaggatccaggtctttctctgtggtctttattcaccaaaactactacagtgttggtgtctttctgattaaaggactcaggttcctcaagtttgaaggagaaagtaagttttaaatactttttacaaaggaaactttccttcttgcttctgcctgtatgtttatctaattccataaccaactagagaaacaggaccatccatcttcaggtcttttacagacttgtagacatgcagaaaatgctaacagcagcaagacatttacataggaagcctttttaaaggatataaattaccatactgataactcataggtgttagacacagaccaatgctttttgttggttttcagcttatggtatatttataactcttctaagctggaccaaatgatctaacaaagggcaacagatttctcctccacagtgaatggagggttcaggattctgggctctggccccgatttgtctggtgtgaccagttatgtgacctcgtgggccccttgattgactagcttatgcttcacgtttttcatctataaagtaaggaatcagatattagataatctgctaacataattcttaagatagaagtcagaggttaaaaaacaaatacaatataaataacaacattagcctgatttagarcatgtattatgtgacacttttatacacattatgccattccgttctcaggggaactcagtgagatacgttttattatgatctccatttgatgcaaaagaaaactgagcattagagcaattgattgcctcaccctaacacagacagaggaggagctggcagagaaagggacatgctggctccagcctggctgcctcttmacaccatattgtacacctgcctgtgaccacctccgtaaatgctcccaaccatccatccactccacatccagggaattcaacatgcattcctgaattatttatctctttgtaaagaaggaataaaacatgacttggttattatgcaatacaataatggccaacatcacatttgtaggtcaaatgttcaggacaagaactgcaaattcaaaagcttccagggagccaggtcattatcacatgtcatcagatctaaaatgccatggactttcagaccaaccattgattttcataytgccaagctagaaaaacttcctaattttaattacaagacttatgagtggtgtactgcataatgattatcaaacgtgaagcagtgggtgcttggaatgaaagaagcagtcacaggacacctggggatgtgtgatgcttctgaggaggatactgtttctcagccccagggtgttactgctggatattctgggtttttttgttttgttttgtttttgagactagcccaggctggagtgcagtggcataatctcagctcactgaaacctctgcctcctgggctcaagcaattctcatgcctcagcccctcgagtagctgggattacaggtgtgtgccaccatgcccagctgaaacactctgtgagccaaagaaaaccccaacagtttgccatgcagcccactgcccagccttacctgtgccagtgggtgcctcttgatgagtttgaaccaggtaagaatgattggcctacagagggtgggatgatgaccccttcacaggccgaggggacagctggctgggtaatggtcatccagacaagaaaggagtggggcctggaccaaggtgccagtgatggggatgcaaagaagcaggtcattgtttctagtggaagatgcaggcccaagccctgaaaacaaaagcctgtgtggccaaggggtcgccagaatctaattctcacgcaagtcagggaaagacagttttgagggtaggtgaggtttagttagagacaactttaagatgtctatctttccattaccatttaagagatgtagacccttgagagtggtgtttctcaaagtgtggtccctccaccgccagcgtcagcgtcacctgggaacttgttagcaattcagactgctggagccgtccccagacttacaaaatcagtccttctgggggtgggcccagcaatgtgtgttttatcaagccctgtaggcgattctgatgcatgctaaagttggagaacctctgcactagagcagatgccactcaattattttttaggactcagtacaatgtatgtcctcacttttagaacagtctgcactacacaagaagctatgttagagaagaatcactttacaccctaagaaccgtcagggaaaatctactattggattaatctcagctagcattttcatttgcacagtgcttcttacacattctcatcacattgttgttgctgttgttgttgttgttgttgttgttgtcgttgttttaaagagacaggatctcattctgtcacccaggctggagtgcagtggtgtgatcatggctcattgcagccttgaactcctgggctcaagggatcctcctacctcagcctcccaagtaactgggactacaggtgtgcaccaccatgcctgactaaatttttgtagagaaagagtctcacaatgttgctcaggctgattttgaactcctggcctcaagtgatccttccactttggcctcccaaagcgctgagattacaggtgtgagccacccacctggccccctcattatttttagtaagctaaaagcagcagatctttgcctgaaggagatgtattcctggtgctaaaatcttgcaggcctgtgtggtcaaaagcaatcagagtaaagaaaatcattcctaattaactcattatttccaattcgcaccatgaaagctataggataaatgcctcatttttccaacccctctctttttcctcgtagtgattagcrtaagagccctgaaattgaggaccctgtgccttgtcttcaaggtggtaaagaaagcaggagctgtgcagactggaagctggcttggtgatggtggcatcagaaagcaaagggaggccacgcatggtggctcatgcctggaatctcagcacatgggagaccaaagcaagaggatcactggagcccagaaattccagaccagcctgggcaacatagtgagaccccgttcctacaaaaaaatttttttaatttgccaggcatggtggtgcacatctgtagtcccagctacccaggagtctgaggtgggaggaccacttgagtctaggaagtcaaagctgcagtgagctrtgatggtgctactgcatccagcctgggtggcacagcaagcaactcttaaaaaaaaaaamaaaaaaaaaacagcagagttgtggaggcagaatatgaacaaaatatgagcaaaagagatgcaagcagccaggctagatctgaggaaatgaccccagggggttaacagactctatggagttggggtagtgagttctgaaactcttgttttaagtctttcagaccaaatattgattcatctcaagtgaattttgtgaagttgtggcaggccaggtctcactaacacaggcctccgttacaactgtcccagcactgactgaggagctaggttaaacattaaaagctgattgagccagtgcccttatacaatggctggaatgtaacaaagagcccaccaagagttttgcctaggcttttcctgggccttgaagcatgacaagataaggagggaattcttaacaggacccttttagaattaaacaagttttattgggggtctgaaaaaactccccaggcctccacaaacaagtttattggggtctaaaggaactccccaaacctttagaatttggcaggagacaagataagggtaatcatcctagcacctagacccatttaaattaaataaacttactgaggctccagaagaaggtcttcaggactcagaccttagtcatagattaaaagaagttaatcacttacatctttaggtgaatgcacacttacacgtagacatatagcttagaaggtatgtaagttctggaaaactttgtaattttgagttggtctggtgataatctctatatcttctccctgtagctggttatagaaatgaaaactctcttcctccccagttcatctgtatctcattattgggccacgagaaatagcagcctgaccctcagtttggtccgggaacaaagtcattgaattgttcttagctcagctttcacatttgtaagcaggagtrggagtgaatgatacctaattcttaaacagttaaaatagtgcgtatggaagaactggctctgtgccactcacctgtgttgctttccccagcccctttgttgggacttcttagtctttatctcaagtgtccctgaggttggggagatttccttgggattcagttggcttatgtttcttttgtttaggcccctaaagttggctttgccctttcagtttacaggtctttctgttggagaacttgaaatgtgctgcctccaacagcaagcagttagaatgacagtcatataatgagggtctaatgagggaaatgcactcagcagtgctctgtaaacgtgggtaaggtgtgtttacttatctaccatttacttgtttgaacatctcagagatttggaggtggaaaaggaacttgggcctttggttggtttgctttttagttttgtttcttgctcttttaaggtggctttgaggcctatctgattatttaatagactttgtcttggaggtaaaagatactgaactttagaggaatccctagatctctgatgcaaagtggaactcgtaattccctactttcagctgccaatacaccacagcttacatattatgataatgtaatgatattttcacctcatttttaggttccattattattatggagccttatacttttcatttataggcaaatcaaagttttctgggccagatgaataagactcagtgacataatgaattttaatctctgcctcattgtcaatttaattgttctataactaaaacaaaccttgtcagcatgtttaggggaaataattctgtaattatttgagaataatcgtgggtatgtaaatggagttatcacatcagaattgagcataatgtggccacactcctattggaaatgccatatgcactaaagggagcagctccagcttttacccaaaggaagtaaacccaggtctgggccattccaagaggcagcttagaaagttcttcgaaatctcctgctttaccttccaaatacatgctcatttggcattcagctttaggtttcttcatatttgtttttaaaataaagacaatttaacccaaaattttgggtaaaatgatgttcccaggcaggcacccttgcccttgggcatagctgcttacctctgggaacagaaggggcctgtatgagaagccctgatgtcttgggaggctggaagacctgggatataggtcagcacacatatatgactgtgtgattagatgctgctgtgtatttttagcaaaccacctcatctttcatgcagtgatactgtgcaaagaaagggtaaaatttgaataacatgctggagactaaaggccgagggagccctgtcaactgagctatagtctccggactgctgaaacagaagatcccctgccagggtgaaaagagctgatcttcacactcttttgctgaattgcagttttaggggtgtgcaacagtggtgtgaattcatatttacaacttttcaaaaggcaattgtagagagaaaatgagaatgagagtaggagagaaagacatctgaattaacctcaaagctcttaatttaactccaagagcttctcaataccctgcagaatcttctacaccccacaacagattcagtttggaatctgttaaaccatttgccaagtatgctctgttgtggaaacatttgggtgcaagacacacacagtgaaactgccagagcttcaacagagagagggggggcaacaggacccagcaccaagcagttagaatggtagtcaggcatcagacaagccacagagcaaagggagcttgtcagccctgagaagaccagccatgtccctggcaggcctgcagcctcaggttgctccagggtgaaactatttgggctgagtcttcacatcattttcacagtcaataaactgtaaagagtctgtctgtgagtatagcatatttctcaacgtcaaacatgcttctgcaacgcatctcgagtgagaagtcaggttgtcaaaccttcctaagactgggcaaacatttttacttcctggaaaatgtttattatggctaccattccctccatttttgtatcatcagtgtggtgcttagatgactttgtaaatgatgttagtgaaaagccaagaatttaggtgggattttatggagacttaaatgatgtgtctcctcactgagcttagtagcttttggaaaacatactcttttttcttcttcttttttttttttcatctacagacctgtttttgatgcaataaagatgaagaggcttctttgtaaatactatgaatgccagcagaggagtatttaaatatgaagaaccaaaatatgtatgctttaaaaaggaaggaataaatgtaccatcctttgttatcattgcatgtttgagctcatttcagcttagcatgaaatacgccatttaatcctatacttttaaaaaatatacattggaatgcacatactctagacttacgattctataaactataattattaaaattatagtttctattgttcccccaaagaacttttattcttagaaagagacaaatttggggtggacatttttaaattagaattaggagccagaggctttagccattgattgttaattgtcctggtggtgcagtatagcactgtgaggaggggtggtcagcatgtggaggtctcccacggccatgtccaggcacaggcttgcaagagaagaaaagtccacaacactaaggaatttggaagccctgattatgccatgaggactggccaccttcagagttaagaaaagcatggtctagcctgaggatgtggtctctraactgatggctgatctccatttcttggtgtcagccattgatgggaataacagacakaaaggaggagggagaaggccctctgatgtgaagaaggctaattgttgtcaaaatgccagggatttattctaggtcccattgctccatgcatagaaagccaatcactgagacaatgagtattgccaggaaagaaggctttttatttgggtgatgttaactgggagaataagagttaagtttcaaatccatctccttgagcaactaaaattggggtttatatatcagggaaggaatgtaaaacaggaacaaaggaggagtctaaggaactaaggaagatgaataaggggtatggcatccaatggtctagatctgggcatctggtgagtttcagtccctcacctgagagtcagtttcctgaggaaggaattccaatgagactgtaactgcccaaagggttcaccttgcccactgtctagacagagccgattcatcaagacaggggaattgcaatagagaaagagtaattcatgcagagccggctgtgctgtgcgggagaccggagtttattattactcaaatccatctcccggagcattcaggggacagagtttttaacgataacttggtggggcagggtggagtagtgggttggagggggtggaagctagtgagccaggaatgctgattggtcagagatgaaatcatagggagtcggagctgtcttcttgcagtgrgtcagttcctgggtgggggccacaaaatcagactagccagtttgttgatcttggtggtgccagctgatccatcaagtgcagggtctatgaaatatctcaaacactgatctcaggagcaatttagggagggccagaatcttgtagcctccagctgcatgactcctaaaccataatttctaatcttgcagctaacgttagtcctacaaagacaatctagtctccaggcaagaaggagatctgctttgggaaagggcttttactgtctttgtttaaactgtaaactacaaactaagtttctcctaaagttagttcagcctatgcccaggaatgaacaaggacagcttggaggttagaagcaagatggagtcagttaagttagatccctttcactgtctcagccataattttgcaaaggcagctttaagacaaatgtaagtttcaagttttcataacacctcaggacctatgagagttttgactcaccaatcctggccatgttttactctgattcttatcaaatgagactctaagggacagacatgtgtcaaagaatttgacaatctcttatctggcctggtgccgagccccattccgtatgtcactccactggttggctccctctgctgaacagcccaggatccctgagatgcacatcacatttgggcttcagggcagtcataccaagatttgtctacaagcagcagccaagctcacaggctcaccaggggcacctgcttcagtgtgaaaagatgaataataatccctttgtactccccttgcctgaagctgtgagccctgtgatgcccagtcattactcccagtctcatatcaggcaggttgatgtgaatatccaatcacaacctatacagcatcaagaatactaagagaagaaagaaaaagactgaacccacacaatctacaaatagtgagactctgagcaagagattatggatattttcatttttctcttcctagtacagattaccttctaaaaaatggacactgtggatttgcttaatacccagagttttaaaattattttctgcaaacatacaacacatgcaaaggcaaataggaagagtcattctgccttcaaatactcaaaatcatttctgaataaaaccttcctagaagagaatggaagcaaaaaccctagctattttgattaacctattactaaatattgagcaatgatgaaaaacaaaacattttagcaacattgttttcaaatacctactagattctagataatccatgtaacaattgtgttctgaaatttccgaggaaggcaattgwttaattaagagagacctcagaagagctccttaatgccttgttcaggctcctctccagcagtttcctggaaatccctaaataataataagtggagatgcagcagttcaacactctactttgctaaatggaaatacattataattacaatagtaaacrtctattgacctatcattctagtgccttaggccctgctttaataaatactttttgcaaatttgaatgtgaaaagacatggtttgcataagtagttacaaagggtcttttctattacagtaattgtgtttgttgatttccattttcctgaaaagtacccatcacccccactagcagatcctctactactgggaaaaacattaggttgctagaaagttgttttaatcaatagttgcccagtgaaatcactgtcttcgttgcctgtagctggtaaaatcactgtgaataaccatgcttgtgttgaagtgtgaatatccatttcagtgcttgttttgtttgtctcccattttccttctttttacagatttttaaaagcattggtgctgatgagaccgtccaaggacaaggaagtcggaggctgatcagcttctctctctcaggtatgttttgctcacctgagactttgtggagagactaagaatgtcaaccaagagtgaagacactcacttccatttcactcttacctacaagtcagtcaacctctctgtgcctcaatttctcaatctgtaaagcaaaaatgttttttaaatctgttcaatttcccttgaccacataaggataatagagagtttaggaagtaatagatgtgaaagcatgttgagatgatggaaagggaggctgcagttctacctttcccccaggtccatgtagcagtagttgagcatatacaaggggaagtaaggaaaacctgggaagagaagcagctattcaactctttgtctaaacaaaacytcacatggggcacaactggcaaaacagataactgagccgctcaaaaatgctcattcatggaaaaaaaatcagtggaatccaattaagtctgttaactaataatattttagtttaatatttaagagtaagttaacgttttagttttcatgaatgtaccatggttccatctgtcatgcatgtctgtgtgaagagagtccaccaacaggctttgtgtgagtaacatggctgtttatttcacctgagtgcaggtgggctgagtacgaaaagagagtcagcaaagggtggtrggattatcattagttcttataggtttgggataggaggtggagttaggagcaattttttgtgggcagcgggtggatctcaccaagtacatttcaagggtggggagaatattacaaagtaccttcttaagggtgggggagtatcacaaaatacattattgcaagggtggggagggtgtattgtcataaggtcaattgatcagttagagtggggcaggaacagatcacagtggtggaatgtcatcttttgtggttcttcagttgcttcaggtcatctggatgtatatgtgcaggtcacagggcatatgatggcttagcttgggctcagatgcctgacaacatcatatgttaataatgggacaaactgggcaaaggttatgtgggaaatctttgtattatctttggaactcttctgtaaacccagaattatataaaaattaaaagtttagggctgggagtggtggctcacacctgtaatcccagcactttgggaggccaaggtgagcagatcacctgaggtcagaagtttgagaccagcctggccaacttggcaaaacctcatctctgctaaaaatacaaaaattagccaggcatggtggcgggctcctgtagtcccagctacttgggaggctgaggcaggagaatggcttgaacatgggaggtggaggttgcagtgagccgagattgcaccactgtactccaacctaagcaacagagtgagactccatctcaaaaaaaatgaaataaaataaaataaataaaagtttaaaagaaaawctgagctgctctggctaacatgatatacaaagctcagggcttcacacactcaatcccaccctaaacagtctttaaggggacacagcggcataaagcctgaggactctgttgagcacagttggaaaactactaccttagcttgtcaaatcaacagatgttgcaggccatgaatgccagaggtcacaggcatgaagtacatgtgcctccttgggagctacactgttaactgggcttttcaagtctaagtgagcccagtaaagcaaatatgttttgatccattgacagtgttagcatgtgtatatctaggctgaagaaaaaaaaaaagaagaaaaaacttgtaaccacccaatgtgttcaccttgcccactgcctagacagagccgatttatcaagagaggggaattgcagtagagaaagagtaattcacacagaactgtctgtgcaggagaccagagttttagtatcactcaaatcagtctccccgagaattcggccatcagaatttttaaggatagtttggtgagtaggggccagttagtcaggagtgctgattggttgggttgaagatgaaatcataaggagttgaagctgtcctcctatgctgagtcagttcctgggtgggggtcacaagatcagatgagccagtttagccacctgggtggtgccagctgatccatcaagtacagcatctgcaaaatatctcaagcactaatcttaggttttacaatactgacattatctccaggagcaatttgggggtagtcagaatcttgcagcctccagctatatgactcctaaatcataatttataatcttttgactaatttgttagtcctacaaatgcagtctagtctccaggcaagaagggggtttgtttcaggaaagagctgctgttgtctttgtttcaaaggtaaaccataaactaagttcctcccaaagttagttgcgcctgttcccaggaatgaacaaagacagcttataggttagacgcaagatggagttggttaggtcagatttctttcactgtctcagttataattttgcagtggtggtttcaactcactaattttgtacttctaaggcaaaagctagcaactcctattgaaatgcttaagaaataacaatgattaataccaaccttcaaaaacagtagaaaccaggaatactgcacaactatgtgccagaaaccaagaggaattgtcactaaccaaaggtccagtgaagtccaagtcctgaagcccaagaggaatgccatgcatggtgagcagggcaggactggggaggggacagtctctattcctttatctctgctttgcctctgccatgaagacatgggctcacagacctaccagaggaggaagccccaccaccaccccaacttggttcacaaagctactttataaggtgatcagsgttggttcatctcctgcagtccccaaacacatcatttttcttacatttattccaagacaaccattcccagcaaaggaaagtgactaggaatataaagttagtagctagcggagcaagcttggaatggtcatggacatataatgctcagtagttggctatgtatatgtatgttgcattcactatgtctgcctaggacaaaaagcaaatactgttgaaactatcaaaataaattccatgcagccaggcatggtggctcatacctataatcccagcactttgggaggccaaggcagaaggattgcttgagcccaggagtttgagaccacctgggtaatataacaagatcccattgctacaaaaagtaaaaaaagttagccagccatggtggcatgtacctatagtcccagctactcaggaagctggggcaggaggatcacttgagcccaggggttagaggctacagtgagctctaactgtgcaactgtactccaggctgggcaacagagcaagaccctgcttcaaaagactaaaataaaataaaaataaattccatgcctcaaaaaaagacaagacagaaagatcagcaaagcccacaaaatatcaaaaatttgctccatgctggtcagctctgagtataagagcagagctaaggattccagcaacaaccagttggacaaccaaactcactaaagatggacaaacgccgggactacatgacatgctcgtaggtaaacaacagaaattttgacttgaacaatgtgtggagaaaatactctaccctattaaaaagtcgaagactataatactcaagagaaaaagaaactattctattgacagatacctactaaagagaagtaaaatatttatcactcatctgcttgtaccctcaacaaaatagagggaagtgcagagcatattaaataagagatcaaagatgagaaaagatgataagggagttttttaaagcttgcaaaaatagaaacttagaaagtcaagtgtatttgctttctcttgctgctataacaaattgccaccaacttagtggcttaaacaacacaaatgtactcttactgttctggaggtcagaagtccagaatgaatgttaagggactaaaatcaagctgtcagccaggctggttccttctgggggctctggtgcaaatccatcccttgccactttcagcttctagaggctgccagcattctttggctcatggctacattgctccaatctctgcttctctcatcacattgccttctcctcattttgctcttcctgcctccatctgacaaggactctgtgattacgttgcactcacctggacagtccaggataaatctctctactgcaagatccttaacttaatcactctgcagagtcccttttaccatgtaaggtaacatattcataggctccaaggattaggatgtgaacatctttgtgaggtcattattctgtctaccgcagtcaagaagagatttaaaataaactctaaaaagtacaatcacagaattaaaagccttcaaaagcagtacaggtcacactcaccactacagaaagggaatcagtgatatgacagattgacttgagagtctctcccggaaggcatcaatgaagggcaaagtccaaaaaggacgagggaaaaaaagatgaatggcacatacagagccaacacataatcagtgtttttgatgaagaaatcagaacaaactgaacagaaacagtaatagaagaaaacttccttgagctgaagataattttgagtatktaaattaaagaagaccatcaggtgctcagagaaagaaatgtatatgaagagaccaacacctagacaaatctcatttaaaaaggttttttttttttttttttyyccccaaatatagccacagtagacatctgggctgaaaatgcatgatacgtacaaaagaacaatcctcatgctaatctcagacttgtcttctgagatgccaaaataatgaagcaaagcctaccaagtgatacggacaggagacagggaaatactgggtagaagagggcagttacccagcaaaggccccaccctcaatcctggaaacccatggccctaaatgggaacaggcgttcctgttttcgcacccaaatgttgcattttggcccaccatgcccctctatcttgtacccatataagccccatatcccaggctccacaagcagatgagcagaagagcagagcaacagaagagtggcacggcagagaaggagagaagagaaggagcatccgaatgttgagaggagttcagttggggaaggtcgaagaggagattggccgagggacagccaaactccaggggaagatcatcttcccactccatcctctttccagctcaccactcatcctgctgagagctacctccgccaatcactgaaacccctgcattcaccatccttcaggtcggtgtgtgatctgattcttcctggacgccagacaaggatccagataccaagaaggcaatgaattggttaacacttaagccagccgcagatggcagagctaaaggagcactgtaactcacccactggggctccaggagtcacagacaccctcccctagatgctaccgcggggccggagcccaaaagcactcactccggttcctgcacctgcccgtctgcatgctccctctcccataagrggtttgagcatacgagccacacccctgttgcatgtcctgtgaggggggtcagggaactctcctatttcacaagttctaaggggagaattgttttacccaagatttccatgtccaccagattttcatatatgtgggaaggcaagaggaacaccctcaggtttataagggctcaaacactaccacacttacacctcactttaaaataatatgtaagcatgtactccagcatacagagataaaatccaagaaaactcgagaattggggacattgcaatataaaaagactgattttctttttagggtttaaaaggggaaataagcagaaagtagataatggaattgccttcttagaaagctccaacagtacaatgaacatatcaaagcaagattgctcatgcaaatgctttacttgtcaagtctatttatacttcctgtttttaccactgcctggaggtaatacattttctagataaatattatcactttaattttcaatgaagtgcacttttagcattctaactgaaaaaatcagaaatgcaaacaaagatttatttacaaatatattggagacaacttaaacattcaaaattagggcttggttaaataaattaccgtagagccaaattattaaatgctatatactcttaagaattgggtattcaaaatgttctaaaaggcatgggaacatccttatgatgttgttggcgtgggaaataatttttcctctggttttcataagttcttggctgaggaccccctgtaacagaagatagattaacaagagaaaaacaaacagaagttattaacatgtatatctcatgtatacataggagatacccagggaaaatgagtaaatctcaaagaagtggcttagaatttcagcttacataatgtcttcaacaaagaacagtacaatttgtagtgaagtgacagggcaaaggaaaaggactttgagtcttcaggggcagcaagttctgggaaggctatggtatggtagatagatgctgtttagtacagtttattatgcagattcgtctggtgctgtctcctggttggtactggtctgaagtcatctctggtgatcaacctttgatccccctggtagagagcggaagagggacacctttgtaaatttatgccctgcttttgggaaaatagcgagagggcaaagagcttttcttttatctacttcttctcagttgtcttcagctcaaaataatccttatgccaaagtcacagattttgggatattgtttcccaggctctcacatataatggggtgatatattcttgtctcttacacatatgatgcaagtcaaaagaaaaatcttggatgcagtaatgaatatgcagtatgttctcaactacgcaaagaaaaatactaggaggaataaggtttggcaaaggttgccactggtggggagggggtacttaacttgaaataaataattatttcaattagttatttgaaataactttaaaattctattttttcattctatatttttaagtattataataaatgtacatatgtctatcaccagaaccaaaaaatacaggcaaaaatgagaagaaattaactattctcctttaacgtagcatttacttttggaaaattctagaactctatgtgctcttatggacatttctcccaacagtctcataggggaaaacattaagacctgaaagagttaaattggtttactcaaagttacaaatttcaacaatgagtgttctcaaatgactaccagtccagtgccttttaaattatacctcttattgcaacagttttcaagtacttttattccatgaaacgtatatctcagtgagtatttagactgaaattaaatatgtaagtctttataaagaaaagtgtaaacatttgctgaaggacaggaaagaagacctgtacaaatgaagaaacatgtgctcttgagtagaagtctccgttttctaaagctactaattctcccaaagctaagatataaattcaatgcagttctaatcaaaatccaagtgttttgaaaggagttgttaaaatttaataaggctcatctggaacaataaatggctgagtgataaagaaaggtgttatctttttaaaaaaataagaacaataagagtgacttaatttagcagctatcaaacatttgatgaagacatgttggtgcagatgtggacaagttgtttgatagaacagaacaaagtgtatcgaaaaagactcatttatatttgagaatttaacctatgccaaagttgacatttttataaaaagacaatataacagattggttaaaagcacagactttgggccgggcacagtggctcacacctgtaatcccagcactttgggaggccgaggtagatcaccctacgtcaagagtttaagaccagctggccaacctaatgaaaccctatccctactaaaaatacaaaaaattagccaggggtggtggtgagtacctgtaatcccagctactcggtaggttgaggcaggagaattgcttgaacccgggaggcggaggttgcagtgagccaagattacaccattgcactccagcctgggcaacaagagtgaaactccatgtcaaaaaaatcaaacaaaaaaacaaaagcacagactttgaaatcaaagaggcgggttcaaatctcatctctgatgtcaaccagccctgacaayctgtaagccttcattttctctttcttgtattaaggatataatctctaccttgcggagtttgtgttcaggattaaatcagaaaatgtattttaagtgcttagaatggttcccagaatttagtagataacaaataaatagtaggtggtggtggaggcaatggtagtcactattttatgatgaatgttttwtatatatatgtctttcacactctaataagtcaggatctccaagatcacccctaggttcaacaatttgctaggaggactcacaagactcagcatctagwtatactcgtggtatgacttattacagtgaaaggacacttagcaaaattagctaagggaaaaggtgcttagggcaaagtctggaggaagccaggagcaagcttccaatgggcctctcccggtggagttacacagacatgcttcattcccccagcgtgaactgtgacagcacgtggaaatgctgtctaccagggaagcttcttagagacttgagactgggtttctactagatggctggttgggggacagtgggggtggtgctggtcatgtgtgcatcttctgcttagcccacatcaaacttccggcctcccagaaggaaagcagtgttcaccataagccacatcatttacacaaacactttaggcacagtgagccactcgtacccgttctgggaaggtaggagccctcctgaaatccaggtttctagacattagccaagagccaaccttataagcagttgagtagtctcargctgctatgttaacttctgtctacacacattcctgcagatgtggcctgggttttgcaaatttctgtgatgcttgtacttcctgccttttttctttcattggcaattgtgggggcaaaagtgactccattgtggatgtgaatctgctgtgttgacttctgatcaccccccagtcttgcgcatgcctcctcttcctactttatccactgtctctagtgtaagaacatgtcaaccttgatgttatgacagaaacaataggctgtgatgcatgcagcattcctgcctgttctrgagggctgcctttcattgtcttgcacagagcaagggcttatataccccttccctatggtacataagccctgggtctagggagtaacagtgcagagatctaccagtctcctacagcccaagaccatgcttatctgtgagttccctaataaaactccttttaccgacaaactggatttgtctgcctccttctttggtttctcaactcctttggcatttggtggtcattttgaatatacagccctttcacagagcagtaatacattatcatgccagagagtaggaataattttattaaggggataaccttggatcaactcaaaataacttttaaataagtgcatatgaaaacaactgtgctttttcgtcagtaacaaattattgaaacccctcacaacttaaaccatgactgggaatccctgatcctgtgtatctttacctccatttgtttcacttgtgtataaatgtaaataattttgtttgaaaaatacttcaataatagaaaagctttaaaaattatattccttggctgggcacagtggctcacacctgtaatcccaacactttgggaggccgaggcgggcggatcacctgaggtcaggagttcaaaaccagcctagccaacacagcgaaaatctgtctctactaaaaatacaaaaattctccaggcatggtgataggcacttgtaatcccagctactcgagaggctgaggcaggaagaaatgcttgaacccaggaggcagagtttgcagtgagccaagatcccaccactgcacttcagcctgggtgactccatctcaaaaaaaattatattccttgacatcatcaatatatttctaataaatataatgtgatttcacattatccaactataaactgttgccttaaatgaccttgtgcacacacactctttctgtctctctctccttgtgcagcatgaaattgtacatggtcagatatcttcaattaaacagaacagctcgattttcaaagccctgccctccctggcagcagggtttctcagaactctcctcattgactgcactcagccccgtggaggccaggtcttgtttgttctttcctccattgtccacgctctgtgctcttttaatcctctcctttctctttatttctgccaattctctcaccttactcagtgaggcccacatatatcgtgagactacaacccctatttttttaatgtctccaccttgcagaggaattttacacccggacccatcaaatttccaaagttggactttctctccctgtgctacccacgtttcctggggtgaccctcactccttcaccccagcctgtttacctgcctgagtaacactagagatctagttcataagggccaatggtcctctcatgaaaggtgtggttaccaaatgccagtcgttaacctccctaaaacatatttaaattaaagtatcctttattttatagatttccaagccatggggttgaagaaagggatgtttttcaacccagacccttatctgaagatttccattcagcctgggaaacacagcatcttccccgccctccctcaccatggacaggagaggagatccaagatcataggcaacaccgtgaaccccatctggcaggccgaggtgagtgctgtgggccctgaaaaaaagcccaagtaaaagtgaaagggctgactgtgaaccagccctcctccttccctccattcatggagccctggactctgctgctcaatctatggctgtcatggtcttagaagggagccatgttctccaggggttgcaactcagggatcttgatcaagtccatccrgacagtactaacacacttttcattgcactgcatgcagtagcctcttctgattcagaacccatgccgcgagcaggacggcctttccctctgcccttcatgtgggagaaggaagacaagagttgtgatcagagccttccagtttctccacagctcttcccatgcatgtgatccttgagcaagggtgtcaaatcttaaatatagccttctagaccagtttcagagattctaaaactgggaggttcctgggataggtgaatcagtaagccctaaaatatccctggttgggttaaatattgtttgatttaaatagataatgaagcctaatggtttatcctatcttcatgatttgcaaagggctgggcagcttgctacagtattgaatagtctatgttgtctacaaaggcccttctccactcctaaaagtgttgcctttgccaggggttaggagggtcctcmaagttctctcctaaaggacatgtagaaagtcggcaccacttatttggccaggcaaggtagctcttagggaggctagggcaggtgaatcgcttgactccagaagttcaagaccagcctgggcaatatggcaaaaccccatctccaccaaaaaaaaaaaaaaaattagctgagcctggcggtgtgtgcctgtggtcccagctactggagaggctgatgtgggaggacttcttgagcctgacaggcagaggttgtagtgagctgggatcatgccactgcactccaacctgggtgacagagcgagaccctgtctctaaaaaagaaagaaaaaagaaagtcatcaccacccatttggctgcctccctgccagacctgagcttgaagctataacctccaaaccatgtgactgaggggaggggaggcctaggtcatgagagtggatggggtataatgtaggttaaaagtacagttttacagtcatagaaacctggattctaatcccagtgtggccagttaatagtttataaatttgagagatcagttatcctccacctgagccttagattaccctcatcagcctattattgatggaaacgtgctcccaccaaaggaacttgctttggagaggatttcttcctttatttttcagagtagatcatctctgatttagagctttcaagcatccttgacaagaaaacataattagacatatgagagcaaagattttttattatctattaaatcataccacccccttcctgggcttaattagcgctctcccaggcttcccagaagagcttcgttagagctttgaagtggacgtgagggaaatagacttgtacttaaacttcctcctagcgttggttatcaacagattctaaaacactgatagcaccgctagaatggaataatgaatcttaatttgtttcttcagtcctgcctgtgttcatcaattatttctgaactcttccctgcattcctagagataataaaagatgtcaaaagaatttattttgtatggggggaaaggcttctctcttctgaaggactttagaggaacctgttctaagacatttagtcataaaggtgttttaagtgtcagggaatgtttggaaaatccagcactatcagaatgttttttggctaaaaacgtcaactagaattcactttaagttctgaaatgatttctgaagctttggttaasactgattttgttctggcagaatactggcaaactctccccagccctctgctctgggccacctcccttccatcccacgtgctgcagttggagttattgatctaaaatatgcctcatctcatgtccccctggtaaggctcaggctgaggataactgatgtcccaagttaaacagtgtgtaactggctaaaggagatttgaaccaaggtttgtgttgctgcaaaactgtccattcaacccctaaattgtactacagttcccagggtccaagtgtcaatgtcatagctcctctgcagagcattcaaagccttctttgatcaggcattgcttaccattatgtcagttaaggatgtatttggctccatgcaagggaaagtctggctggctctgatatttctcacaaacaagacatccagagggaggtgatccaggcggtgccgctgctgagtgagcccccagggmtcccagctctccgggcctgccactgcaccatccttagcagatggcctcatcctcctctgttaaagcctcaagtccaaattccaggcaggaagaaagcaacaggccaaaaaagccttctccttgcaagactttgcattttcttcctgggagaaaatgactgggtggcttaaacaacagatatgtatttctcaaagttccraagctgggaagtccgagcccaggatgctggcacggttgggttctggtgagggcctctttggggatgcagatggctgccttcttgctccatccacacgttagaaagagagaaaaggaaagagagcacactcttataaggacactaatcccatcgtgaggaccctatcctcatgactcctctaaacgtaatgacctccaaaggcccggcctcttaataccatcactttgggtgttagagtttcacatatgaacttgggggttggtggtggaaggagacacacacacacacacattcagtctataacaggtttcagtccacaacaggaagttttcctcctcatattttctggaaatgtctgtgtataattattatttcttccttaaatgtttgatataatttaccagtgaaaacatcttaggctggagtttctctgtgagaagactttaaattatgaatttagtcttttaaataaaaagagtcatttagattacctatttcttctaagagaaagcatttgtctttcaagaaatattgccatctttttgtgttgtttggcataaagttgttcaaagtattgttttattgtcttttaatgtttgtaggcttattaaggacaatacctctttcatttatatattggtgaattgctttttttctctttgtttgttaaccaatctaaatatgggtttattaaatttgtttattttgtgaaagaactagctcttgacatcattttctctatgtttaactgttttctatttatttttatatatgcccttattttcatttatttatctcctttattgccttctattttttttttttttagctccttagggtaaaagtctaggtcttgcttttagacttacatttattctctaatacaattatttaagcaataagttttcttctaatctctgttttaactgcattttataaatttgtatataatttatacttttattatcattccgtcaaaaatatttcttcatattccttctttgacccatggattattttgaaataagttgtttaatttccaaacctggggattttcctaaatatcttcttgttactgacttttaattttattttattgtggttagagaacatactctatatgattgcaatctatttaaatttatcaagccatgttttacagtccagcatatgatgcattttggtaggcttaccatatcaacttgaaaagaatgtatattctcctattgtggcatatcaagtcctataaatatcagttgagtcaaggtggttgactgagttgtagagattctctgtgtctttattgctttctatgtctagctgttctatcagttgccacaagaagcatgtttaaatcctttactatgttcatrgaattgtctgtttctctaattctgtcaacttttgtttcatgtattttgaagctctggtattaggtacttgcatagttatgtctatgcatcatgtttataattctaaaatatttttctttatttttggtagtgctccttgtcttgaaggctgttttatcacactaatatagccactccagcctcccttatgtttagtgtttgttccatttactttcaaaatgtttgtgtttttacttataaagtgcattgcctatggacagcatattcttcggacttaatttcatttattacaataatctctgccttttaataggaatgaatggcccattaccatttaacatatttattcatgtaattgtatttaggcctactattttattatttgttttctgtttgtcctctggattgttttcttatttccccttcttgacttgtttttggattatttgaatatattttagaatttcatttcaatttatctactgaatttttaggtacacrgctttkcgttacttcctttgtagttgctttagggaccataaaataccttcctatattttcatgatctacattgrgttaattttgtaccactttacataaaatgcagtaactcttcaacaatattacctgcatttatccacactcgtgatctttcttgttatagttattatatatatcacattgtatatacattataaaccctacatgacgatgttaaaaatttttgctttaagtggatgtgtattttaaagaaactaggaaaaaaatatagtccttaatgcctccccatacatttcctatttctaatgcttttcatttcttttatttatttatttatttatttatttatttattttaattattatactttaagttttagggtacatgtgcaccttgtgcaggttagttacatatgtatacatgtgccatgctggtgcgctgcacccactaactcgtcatctagcattaggtatatctcccaatgctatccctcccccctccccccaccccaccacagtccccagagtatgatattccccttcctgtgtccatgtgatctcaatgttcaattcccacctatgagtgagaatatgcggtgtttggtttttagttcttgcgatagtttactgagaatgatgatttccaatttcatccatgtccctacaaaggacatgaactcatcattttttatggctgcatagtattccatggtgtataagtgccacattttcttaatccagtctatcattgttggacatttgggttggttccaagtctttgctattgtgaataatgccgcaataaacatacgtgtgcatgtgtctttatagcagcatgatttatactcatttgggtatatacccagtaatgggatggctgggtcaaatggtatttctaaatctagatccctgaggaatcgccacactgacttccacaatggttgaaccagtttacagtcccaccaacagtgtaaaagtgttcctatttctccgcatcctctccagcacctgttgtttcctgactttttaatgattgccattctaactggtgtgagatggtatctcatagtggttttgatttgcatttctctgatggccagtgatgatgagcattttttcatgtgttttttggctgcataaatgtcttcttttgagaagtgtctgttcatgtccttcgcccactttttgatggggttgtttgtttttttcttgtaaatttgtttgagttcattgtagattctggatattagccctttgtcagatgagtaggttgcgaaaattttctcccatgttgtaggttgcctgttcactctgatggtagtttcttttgctgtgcagaagctcttgagtttaattagatcccatttgtcaattttgtcttttgttgccattgcttttggtgttttggacatgaagtccttgcccatgcctatgtcctgaatggtaatgcctaggttttcttctagggtttttatggttttaggtctaacgtttaaatctttaatccatcttgaattgatttttgtataaggtgtaaggaagggatccagtttcagcttcctacatatggctagccagttttcccagcaccatttattaaatagggaatcctttccccattgcttgtttttctcaggtttgtcaaagatcagatagttgtaggtatgcggtgttatttctgagggctctgttctgttccattgatctatatctctgttttggtaccagtaccatgctgttttggttactgtagccttgtagtatagtttgaagtcaggtagtgtgattcctccagctttgttcttttggcttaggattgacttggcaatgcgggctcttttttggttccatatgaactttaaagtagttttttccaattctgtgaagaaagtcattggtagcttgatggggatggcattgaatctgtaaattaccctgggcagtatggccattttcacgatattgattcttcctacccatgagcatggaatgttcttccatttgtttgtatcctcttttatttcattgagcagtggtttctagttctccttgaagaggtccttcacatcccttgtaagttggattcctaggtattttattctctttgaagcaattgtgaatgggagttcactcatgatttggctctctgtttatctgttgttggtgtataagaatgcttgtgatttttgtacattgattttgtatcctgagactttgctgaagttgcttatcagcttaaggagattttgggctgagacaatggggttttctagatatacaatcatgtcgtctgcaaacagggacaatttgacttcctcttttcctaattgaataccctttatttccttctcctgcctaattgccctggccagaacttccaatactatgttgaataggagtggtgagagagggcatccctgtcttgtgccagttttcaaagggaatgcttccagtttttgcccattcagtatgatattggctgtgggtttgtcatagacagctcttattattttgaaatatgtcccatcaatacctaatttattgagagtttttagcatgaagggttgttgaattttgtcaaaggctttttctgcatctattgagataatcatgtggtttttgtctttggctctgtttatatgctggattacatttattgatttgcgtatattgaaccagccttgcatcccagggatgaagcccacttgatcatggtggataagctttttgatctgctgctggattcggtttaccagtattttattgaggatttttgcatcaatgttcatcaaggatattggtctaaaattctcttttttggttgtgtctctggccggctttggtatcagaatgatgctggcctcataaaatgaggccaatttgccagtctgtgtcttttaattggagcatttagcccatttacatttaaagttaatattgttatgtgtgaatttgatcctgtcattatgatgttagctggttattttgctcgttagttgatgcagtttcttcctagtctcgatggtctttacattttgtcatgattttgcagcggctggtaccggttgttcctttccatgtttagcacttccttcaggagctcttttagggcaggcctggtggtgacaaaatctctcagcatttgcttgtctgtaaattattttatttctccttcacttatgaagcttagtttggctggatatgaaattctgggttgaaaattcttttctttaagaatgttgaatattggcccccactctcttctggcttgtagggtttctgccgagagatccgctgttagtctgatgggcttccctttgagggtaacccgacctttctctctggctgcccttaacattttttccttcatttcaactttggtgaatctgacaattatatgtcttagagttgctcttctcgaagagtatctttgtggcgttctctgtatttcctgaatctgaacattggcctgccttgctagattggggaagttctcctggataatatcctgcagagcgttttccaacttggttccattctccccatcactttcaggtacaccaatcagacgtagatttggtcttttcacatagtcccatatttcttggaggctttgctcatttctttttattcttttttctctaaacttcccttctcacttcatttcattcatttcatcttccatcgctgataccctttcttccagttgatcgcatcggctcctgaggcttctgcattcttcacgtagttctcgagccttggttttcagctccatcagctcctttaagcacttctctgtattggttattctagttatacattcttctaaatttttttcaaagttttcaacttctttgcctttggtttgaatgtcctcccatagctcagagtaatttgatcgtctgaagccttcttctctcagctcgtcaaagtcattctccatccagctttgttccgttgctggtgaagaactgcgttcctttggaggaggagagatgctctgcgttttagagtttccagtttttctgttctgttttttcccgatctttgtggttttatctacttttggtctttgatgatggtgatgtacagatgggttttcggtgtggatgtcctttctgtttgttagttttccttctaacagacagcaccctcagctgcaggtctgttggagtaccctgctgtgtgaggtgtcagtgtgcccctgctggggggtgcctcccagttaggctgctcgggggtcaggggtcagggacccacttgaggaggcagtctgccggttctcagatctccagctgcgtgctgggagaaccactgctctcttcaaagctgtcagacagggacatttaagtctgcagaggttactgctgtctttttgtttgtctgtgacctgcccccagaggtggggcctacagtggcaggcaggcctccttgagctgtggtgggctccacccagttcgagcttccaggctgctttgtttacctaagcaagcctgggcaatggcgggcacccctcccccagcctcgctgccgccttgcagtttgatctcagactgctgtgctagcaatcagcgagattccgtgggcgtaggaccctccgagacaggtgtgggatatagtctcgtggtgcgccgttttttaagccggtctgaaaagcgtaatattcgggtgggagtgacccgattttccaggtgcgtccgtcacccctttctttgactcggaaagggaactccctggccccttgcgcttcccaggtgaggcaatgcctcgccctgcttcggctcgagcacggtgtgcgcacccactggcctgcacccactgcctggcactccctagtgagatgcacccagtacctcagatggaaatgcagaaatcacccgtcttctgcgtcgctcacgctgggagctgtagaccggagctgttcctattcggccatcttggctcctctcatttatttattttttgaggcggagtttcactctggtcgcccaggctggagtgcaatggcgcaatctcggctcactgcaacctccacctcctgggttcaagtgattatcctgcctcaacctcccgagtagctgggattacaggcacccaccaccacgcccagctaatttttgtgtttttagtagagatgggtttcaccatgttggccaggcttgtctcaaactcctgacctcaggtgatccacccgccttgatttcccaaagtgctgagattacaggcatgagccaccacacctggcctcttcatttatttctgaagacctgggttttcctctgatatcatttcccttcatcatgagctccttcccctggcctttctagagtgggcctggtgagtctaatcctcttattgtttatttgaatgtctttatttaatgtcctgcagatattttctctgtggatattttcactggatatagaattctgggttaactggtatgtttcccctcagcacttgaaaaaatatggttccgcccagtgaggtggcacacacctacaatcccagctactcgggaggctgcggtgggagtatcacttgagcccagagttcaaggccagccagggcaacatagcaagaccccatctcaaaaaaaaggtttaaaatgcagttccactgtgttatggtctccatagtttccaataataaatctataatgatttaaatcattgttgctttcctatctgtcaggtgtcagttttctctgtcagattcagggttttctctttgtctttggttttcaagttggatttcggcattcccaggcatggtttttgtattagtttcctagagctgtcataacaaagtcccacaaawtgagtggcttaaaactacaaaaatatattgtttcatagttctggtggccagaagtccaaaatgaaggtgtgggcagagttgtttccttctgaaggctctaaagctgttccatgcctctctcctagctccagtgatgtaggcaattcttggcattcttggcttgcagactccatctctgcctccatcttcacgtggtgttctccctgtgtgtctctggttccaaattttcttcttcttagagggacatcagtcatacgggattagggcccaccctaatggcttcatcttaacttgattacatctgtaaagaccctatttccaaataagtttgcattcaaaagcaccagggtcttagacttcagcatacctgttgagggacacaattcaactcataacagttttcctctaatttaatctattgttggttcactgaacttcttgaagctataagtttgttttcaccaaatcaaggaagtttggccattatttatgtttttcaaatattcttctgtttaattctctcccctttttcttgagctccaaatgatccatatgctagatcttcagagtcccacaggtccctgaggctgttttctctctccttgtaattgcatgatttctattgatctatcttcaattttactgtatgttttctctataaactccattctactattgcttctatgcaatgaatattttcagatatcagaattttttattttaagattgccatttggttttttttaatgtgctttattttgctgatgatatttcttacctatctatattcatcataagttaatattttcctttaccacactggatatagttataatagctgctttaaagtattttcctgataatttcaacatctggagaatattgaaaatgggtcatgttttgtgttttttaataaattaagtcattctggatgatgtctcgagcattgttaatgttatactgaagagactctggattttgctccagggggtattgatgttttgttacagcagacaattgatttggcgcagctcctactgtcatccatatggtgggaggcacctcagatctcagttcagttctttaagccctaactgcaaactgatttcatttgccctgtgcgtgtatgattctgggatcagccataaacttgggctgagyttctatacatcgtttggggctctcctttggctctcttctttccggaattcctcctttactctctggtggtgctggttgccccaggcttctttgcctggttcatccagccaaaaagatagtgagatttgtattggcattttagctgctctgtaccactattgcagtgactgtggcggcrttcagggcaaagatcccactgtgaagaattcattccatgcccgtctcttgttgcagtgaacaagttttagcaattaactgtgtagcaattagaaacaattattttacatttttctggacattaccaacatttggatttttaaaaacaagcaacaaatgtattttgtagcatttttatcatccagtagattccatctcttcactgtactttataagttatcctataagctaatataggttttaaatgttgtcttctgtgctattctttgtaagtgtactagtaaaataatttaacataaaaataaattaatgtaagccaccacattgacaatataaagaagaaaaatcatgtttatctccatagatccataaaaagactttgataaaatttaatattcatttatgattttcaacaactcctacaaaactaggaatagaagggaacttttttgttagaaatgcttgtttcccaatgccgtaaagaaatagcatttgaatataaatttaatttccccagcaaggctgtttttactttctgcagaaagggtacactcaccagcagttttgccacgagagtacgccgaacaaaggagacaaggtcatttataacctgacacgtccactctattgctgtgtccagtttccaatggctggcacaggacctcacattctgtatttgtcccgattggctagcaacttagaactttttaaaaggggcaaaggcagaggagaacaaagcaaggaggaagtaacttgtggaatgctgagaaaggtaaaaacamcttcaaataaggaagaggaacaggctatgacctaatgcttacttggaccaatataagcatgccagggcaaatatttaggctaaattgtgggagctaagaacataaagtacattgatttctttattacggctagcagatatttaggaatgttagcacaggtctttgaataaattttgcttctaagggaagttactatttattcctaattagaaggtgaggaaagtctttgaagaggaacctctactttacttttgacattttcaatccaatagaggacttaatatattaataataataacaataaaatccacagcaaacactatacttactggtaaaatattaaaatatatttccttagaaccaagaacaagacaaggatgcacactttagccacttcygtttaatattgtgctagagattctagccagtgcaacaaggtaaaaaaataaacaaataaagtatgtcagctttggaaaggaggacacaaaactgtctgtattttcagataacattgttgtgtcagtaaacagtacaaaacattacccaaactacccaaattagtgaatttagcaaagtaactgaataaataaaaggtagatacgtaaaataaatcatatttctatatgcaaatagaaaataaaaattgttaaaagatattatttacagtagcatcaaaaaccaaggaataaatctaactgcagaggaggaatatggttacaccgtgcactaccactttgctgagagaaatttaaaacagcctagatgaaaggagatattgttcaaggcttagaaaagtcaatattctttaggtgtcaattcttccccaaattgatctgtggtttcagcgatatcctaatcaaaatcctgggagatatgttaatgtaacttgacaagctaattctaacatttgtattgaaatacaaaatgccaagtagaggtaagagagtcttgaaaaagaaaagaaaaaaaaagcaggacttttatactgccggatgtccagataaaatatgaagctctaagaattaaatagtgtggcattggcacagaacagacaaatagctaattaaatagatkagaatccagaaatagatgcaccacatagcatcatcgttttacgacaatagtgctgctgctgtatgttatggaaaggatagcctgttcaatatttgatgttgggtcaatttgctgtccatacagaaaagaaagaaaccttgaatgcagtctcacaacatacacagtctattccaaatcaattgtacatttagatatgaaattataacaataaagcttctaattcataagaaaacaagtaagaatactttcatgtccttgtggaagccaaaaaaatcttaaatagaaaatagaaagcattaatcataaaataaaagaataattaattgaatggcaataaaattaagaaccaccgttcatcaaaactttacattaagagcaagccacagagtgggtaaagatgttgagctatgtctaggtgacagctaatatctagactataaatactacctcctaaaatcaaaaagaaaaggacagaaaccaacagaaaaatggaacaaagacttcaacagccaccacacaaagcggggatgtccaaatgccactaaacctatgagaaggtgtttaacttattttgacatccaggaatgaaaattaaaagtatggtgtgataccactgcacactcaccagtgtgcaatggtatggccaaactgaagaagatcaacaatgatggctgctggtgaggtgtggaacatagactctccaactctgctgataggaggcagggagcaaggacatcagttaggagacattacagaagccaggtgggaaacgaggaagcctggaccagcctgaggcatgaacacagagaagtgtggaggtaaatatacttagccatgatcccttgcttttgtcttctggtctctttaatatccctttgcttatctccctacagtatgtttaaactagggctctggtgtgtgagaagaacatcaaacaaacagtacagcgagctcagggtgttttctaatgctggtgctggttgtgagatgttgttaaatatcagattggaggaaacgtaattgcggttttgccattaaaagtaatggccaaaattgcaattacctttgcaccaacctaaccaaaacattaccaaacaatttaaacataaccaaaccattaccctacaattacccaaaccactgccagacaacttaaagagtcaaatatgggcataaacaccaggggtcagggttgggcctgaacttttagagtatrcttctctttttttaattgttttttggttgttgttgtttttttttttttttgaggagtctcgctctgtcacccaggctggagtgcagtggtacgatctcagctcactgcaacctccgtytcttgggttccagcagttctcctacctcagcctcccgagtagctgagattacagacacacatcactacgcctggttaatttttttgtatttttagtagagatggggtttcactatgttcattagccaggctggtcttgaackcctgatgtcagatgatctacctgcctcagcctcccaaagtgctgggattacaagcatgagccacagcacccggcctttagaggatacttcttgatgccgagtgctttaccagaattatatatactggtagattgtttaccagagttaccacatttaatcatttcaacaacaccatgagtaaatgagaatgagacttattagaaagggaaattgccaaaacctttttgatggagcagaacaatcagccaggttaagctaaaagccccgtcacctggagataaatcgcagtgcctggccgagagtcgtcacctggagataaatcgcagtgcctggccgagagtcgtggtctccaggatttaagcacaattgctaagtgattactgtcatcagacagccccaaggcgttgtaaacaatctctgattggtttaagatagatcattcacttcagtcctgactgattagaaattacaagataatttaatcagacattaaagtgtgcttttgacctggacaaagtaaacatagtgtcattagcacaaaaaaatcacatttatggaagaaaatcattctctgaaacgcagagctggtactggtggtgagtgtgtgagcagccctaaagacggcattatttccccaggacagcagtttcacaaatgattttttaagttccctgacatagacaaccatcatctaagtacaaaaaccagttcttttgttagtaaaatcagctgctgaaccattttatgaaaggaactcatgaatgaatcaccaacatgaaaacataggggacactcttctgtttacgtggggtgggagactggaggtactgcctcttgttctacagtgaygcctgaggctcattcacagaacctgagactcagagacacactgtttgatattcacttgccaaagtgttccttgtacttgtctgttagcatcatttttcaacttctgaggacataagatggagtttttgagtgcagcagtgaaactccttgaaaaccattgccaatgtcttatggaggaatagagtgagctgggcaaggggttagcttggcacatccatccatggtggtgggtggtgagctggagccagctcatgtgagctgacagctcatgtgcamctcttcccaactccacatttagtgaaatcagccatcgagggagtatttacaccaagaaaattggcaaacactacagactggagctggaactggtgcctcgttcattgattgaaaaagttgaagactaacactaaaagtgacatcctgtaagactgataccaaaaatcaaaggtggggctagagtctgaggagagcagatctaagcagatttctaagcacgaaggcttcagaaaaacagaaaccaggtacagacagagccaaaggagtatctagaaatgaggaaatacaagaatcaggaatgatggagcaggcaggtgggagagaacaaaagaaatttcagagatggtagcagttgtctttggcatatctacataaaacggccacagcagaaattccacttcagccaggctcatctctgactgtgattccatccttttgggggccctcttagcaggtccccatctttgtctccatcaggcttgtcttgctggaagaaaattactatgctccagtgacaaatctcaagtcctgacaggctttgctccgtgtagctttctcagcatttttcagggcaatgggttattagcctggaaaaaaagttactaaaaaaatacgaacaggccaggtgcagtggctcacgcctctaatcccaacactttgggaagccaaggtggtaggatcgcttgagcccaggagttcaagaccagcctaggcaacatagcagaaccccatctccacacacacaaaatttaaaattagctgagcctggtgttgtgtgcctgtagttccaggtactcgggaagctgaggtgggaaaatggcttgagcccggggggtcaaggctgcagtgagccatgatcacaccactgcactccagccagggtggcagagcaagaccttgtctcaaaaataaataaaaaaataaataaataaataaaataaaacagcagtcttttcaaagttaaaaatatcaggaaatatcaatagagttcttgtgatattgtaaattactttaaattgcaattttgtcacaacggaattactgtggttatgctattgatttcatgtattatgtaattatcactatactgataccatgattaattagctaatcccacattttctgggatttttttaaaattttaagcccagaatgggagcagagaaggtattatgtatcttgtaaaagcttatgacaaacatttaaattattaacgcatccatccttgactaagagaacattatatattagggagggaataatgggtatgggtataacttagtgtgtttttgagagaaacatacaaacagaattaatacagcacaagtccagtgattgatagagtaatcagaagggggatattatgcagcctgccggtaatgtggaacagtggaatggcaaagccataaagccatagcaatggagttgcaacaagctttcaagcccagctaatacaatcaaggacatttgaacagaagtggatattttatatatttaccaagacactcacacacacacacacacacacacgtgtacatatatgcagatgtacacatgtggatagctaggtagatagatagatagatgatagatagatagatagatagatagatagatagatagatgctttattgagcagtctcaattcggtagggtatcttaataatgtcttgggcatattccataaccttctggtcacttgtatttataagtaatccaatcaagtctaattttatattcagcttacctctcttgtttcttgccccagcctcctgcgctatccactacagattggaattgtggtttgagggtcttggaaattgtcttggttcattttctgttgctataatggaatacgacagactgggtaatttataaataaaagaagtttattcagctcacagttctggaagctgggaagtccagtagcatggcactggcatctggtgagaacatagtagaaagacagaagcagaagcaagagacaagagaaaggagaaccaggccaaagtcatcctttttatcatgaacccattgataattaatgccttcaataatagcattaatccatttatgagggcagagccttcatgacctaatcacctctcaaaggccccacctctaatactgctaaaatggcagttaaatttcaacatgagttttcgtagggatattcaagccaccgcagagaagaggacatatattattttgtcccttttttctactccagcacctttgagagaaaacagagtcatgggaagggatttagagatccccctcaacttttctctgcaaggattatggctgcattgttgggactgggatgaggagagacagagtcaaaattttcttgctaacaagctgtctgatgggatgaggagggtatctggccccaattattgacsaatcatggggcacttaatgacctgagttttcctatgagcacaaaagtgccaaatctgaggtcacagaacatccttttacatctgtttatatatagatacactttcaaatatttgcatcccttctagtactgaaaacatacaaaatacatagaatacggcaagataaaatatatttaaatatagttgagaaacaggaaaccagggaaatgtcttagtaaaaagtaagatgaaataaagttagtataaaaggtgaatgtcaaaagtcttgcacaccctcctgaataacattagaaatgaccaaggagaaagggtctcttgatttcacaggagggatcatatggatagcacttggcctggaagacatattttagtatttttcatacaaatactgtttttgatttgcagctaattttatttgggatttctgtaattatctatgttaataaaatgtctttcatttcctttcttatgcttattcagtttgtatcaaagatgtcttatccttagaaaatgatttgggtagctgtccctttttaaaaattttctttgattggcttgtaaaagaccaggattatctgatccaagaaattttggtaaaatgtacttataacgtgttctggttacatgatgtttgattatcaattcaattatttgttatttattcaggttttctatttcctcttgaattaattttaaaatttttattttctggaaaatattcattatatatgctttctatttattttcagaatgttttcatagtwatatacccaaaatatatgcaaaacgtggaagctgtatctccaaaatatatagagagaacaaccatagtttttttatatctctactatctctttttattaatctgatgccttgatktattattataatctataaattataagtttgaaaaaaaggccctgaaagtttatggttgctaagctctctaagtctttgtatatttgaaaatgtttttatttttacttcactctcaaatgagagttttgtggacatagaactctaggttgacagttatttttccctcagtactttgatgtataactagacacaaaataacagtttccccarctatgatcaatataatgtcagtcaaccatatactacacacacaacacacagagggaggtgccacagtcaaatatggaagcactgcatactatcttgcaaattcacaatgtgtgaattttgtataattaaagcctttgagacatctaacagtaaaatttcttcacccttttaacctagtacttctcttcagagctctttttcttagaattgtcaacatcacatagaaacaagtgtcagagatcctacagcacacttatttaaacatcaactgtcaacaaataactgcatatttgttcaaagtatatctctattatgctgttacttgccctaatttagactactgcgttaggtttctatcagtacataacaaattgccacaaatttagcaacttacaagagcagccatttattatctcacaattctgtaggtcagaagtctgggcacaacctgcgttctcggctcaggatctcagacgctgaaaccacttgtgttctcatctagggccttgtctggtgaaaacattgtttccaagatcattcaggttgttggyagaattgagatccttgctagttattggccagagcagtccatgacacctgaccctctccatcatcaaagccattgatggagaatgtcccttgcattgaatccttctcacattttgtccctctgacttcagacagggcccagtgtttttgtttttaagggctgatctaattaggtcaggctcacccaaataatctccccttcgactgattaattcaaggtccgttgtttggtaatctaatcatggcttggcatccaacacattcacaggccccacctgcacctagtggaaggggattatacagagtgtgtacacagggggcaggaatcttgaggaccatctcagaattctctctaccacatttattatccttcagtgccaaccccacaccagatgaaaagtttcactttgcttcctcttcagagaagtccatcactataacgtaatccgtagattttctgccagaacaataactggtgtgagttgggctttgagtgtgcagtctagcatgcataaaggagtatatttaagctgacccacaaccctggattgtattccatttttgcagtatcattatccagttaccacaggaagttgccattcattcattttctcatttatcaatgtgctcagttcacatcacgtgtggtttctgtgtaccaagcttttctgtgttttagagacattactggcaattgtaagagagaagctgaagacagggagaccagttaggaagtaattacaaggacaaggaatgacaagagccatacctagaccagtggaagtaaagaggaaagaatggactctagagtgaggaagaaaatttagacttactgactgattggatatgggctcctgaagtttgaccaaggttgaccaagatatacagatgaggagcatcactgaagatgacagtttatcaacaaagcacgtgcagaaggcaaagttagaataatagctcttttcttccttctgtgttctgggcactctaaagtaggcacaagaaggtcagttacattgcttatgatcacacagcagattttgttcttagcttccagtctgttcatccaatcctatgctttctttataggtgtttaagtgaatcatctccagaagtaaaagatgggagatatacatatggatataaatatagatatggatacagacatagacagaatacatatatgtgtaatatatgtatgtgtatatgtatgtatacaaatacgtacagatatataatatacaaatatataatatacaaattttacatataatatacaattatatgcatattacatatttaaatacatacacagagaccttgcttcccattctaccaaaccacaactaaatattgatattggcctaatttgccatagcagtatgtgtaaataaaatcaatattattctgttttgtggctgaggattctcatatggagagagatggtgaaggcttgatcaaaatccagtttatttgctcttatgcaaatatttcaagaagaaatataaactttccatatattatatgcatatatatatatatatatatatatayayacatatatgcagattccctgcagttacaaggcttacgtctcagcagcatggtctccggcacttcctccctaggatagagtcaaaccacacactactgggaggggcagatcttctcccatgaccagactccaagggcaccacttcttaatgtaaaacgctgttacattgctagcgagaagggggaagaatgctcctgattcaattcctactctactaatggagttgtctatcattgtccttgactttaggcagcactgtttttgaatgtcatttttaaacctaatgactagtgccacctgaactgaaagtcacatacattgcaaggttctaaggaaaagtagctatagttcacatgctccatttgcttcttgcctgctctttctcctccaggtagaacttttacacagaaagcaccatgtccagtccatttaatttccattagtaataaataatggcattggctgaatggtaccaggcagcctcttgtgaatgaaacctgtttttcatttcccccctttatatctcgctgcaagagaggagaggcaaagctagatgccagtctaactgatgtcatgacctatgtcacacagttaagactaaccttcctccacatcatgaggtatctaatctccacttctaattggtattcctgccttactcttgaatatcctctaccccttcaaacttaacacaacccaaatcaaattaactttccttaccagttttccatccttaaccttttctgaatttcataaatttgtgagtgtgcataaatgaatcactatacctctgttctcacagactggagtcattttttctcatacctctccctaaatgaaaatagtaagtgaaaatactttctcactcaggtctgaaatttcccacaaagttttctcctttttgattgtagcatcaccctcacatccatatcctcatcatcttagctacattgaggcaataatggatccccttatttactctgccacagccagtaaaactctttctacccacggcacaattttccttttataatatcaacaataaaagcagatcaagttagkaaaaattgcaaagtttattgtcacacaaaaagtatagattacaatctgggagacttcaaaccaagtggtaaaaagctccactaagcagttacaacacagtttataaagcataaaggaggaagtattttgacttttcccatgattggctgttatacattatcgtttttcttttcaagcaaaacagagctgtttaagccgatttgtctatagctgactggtttaattttgctgagtcatgtggacaaggatggtaaagcttacattttatgtttataattagaaagagcctttcagggaaattaggatgacaagttttgattacatggttatgggcagttggctttggggtatatctagactgtggcctccatttttatttttctttattattattattattattgagatggagtctcgctctgtcccccaggctggagtgcagtggggtgatctcggctcaccacaacctctgcctcctgggttcaagcaattctcctgcctcagcctcccragtagctgggattacaggcgcatgccactatgcctggctaatttttgtatttttagtagagagggggttttcccatgttggccaggctggtctccaacttctgagcattcctcctgcctcagcctcccgaagtgctgggattacaggcatgagccaccacatccagccccatttttattttyctttaacaatgtctttaacatttctccagatgatcaaggtctacatgaatgactcatagtttccttgaccactccaatctctttgaccttcaattacattcaccatgagccatctattcctgcacttataccgtagaacttgttgaaatatcacaagctctccagccctgtacagtcttctatccttccatrcccaggcctctatttccrtcattctgttccttcattgctttgggacactcagtcattcagcccctctctgcattcctagctatgtcactcctcccacatrccctcaatcttgggaatccaggctcgggaatttgtgacctcttcctctcccacattccatagctctcactgacatttaaccagtccacactctgccacccttttctccttgcctgctagtctccccaccactttgcacttatcttacctgatctgcctcctccaggcctgacccatctatgggccacccctcagcactgcctcagtggcttctctacactgcagatctgagtgtgtcatttgcatggtgcagatcctttagttgctcccagatgccttcaggataagtccaagctgtggccaggaggctgttcatgatctggattctgcatatctattcagtttcatccacaacaagattctccagtatgacccagaggtagtaagccacttgcagttccccaagggactcatgtactctgtgaacttcagcccctgcccatggcacccctctacctggaatgttcctcccaccccttcttcatcccaccgacacttgcttttttttttttttgagatggagtctcactctgtcacccaatgttcaagcaattttcctgcctcagcctcccaagtaggtgggattacaggcacctgccaccatgcctggctaatttttgtagtttttagtagagatgggggtttcaccatcttggccaggcttgtcttgaactcttaaccttgtgatctacccacctcggccttccaaagtgctgggattacaggcatgagccactgcacccggccagttgtttattttatttcttttttttttttgagacggagtctcgctctgtcgcccgggctggagtgcagtggcgggatctcggctcactgcaagctccgcctcccgggttcacgccattctcctgcctcagcctcccaagtagctgggactacaggygcccgccactacacccggctaattttttgtatttttagtagagacggggtttcaccgttttagccgggatggtctcgatctcctgacctcgtgatccgcccgcctcggcctcccaaagtgctgggattacaggtgtgagccaccgcgcccggcccagttgtttattttttaagactcagttaaagcattatgttctctaggaaatcgtctctacctgtccatcaggctgagcctttgggaagccttactatagcatcttctgctttgtcattttctgcctgcagtgtaagactctgaggtctaaagttggaggctgtggccccagcactccagcacagaagggtggtagctgtgtcccagcacccagctcacagccagtgcccaaaaagtgtttatgaatgaatggatacaactttcccctcctttatttaccaacactctcctaatctctgcctaaattgctcattatgcaactgctaccagtttacataattgccaattaaatatttcctttagttagttaccctgttttaattycattaagttcaatttataaaagttctgtttagaggcgatctacctcagatcttttctgaagcaagatggaatataataagcatcttagttctataaatggcctattgagtaaacaacacaaacaaaataaataacatcctcctatattgcagcaccagtgctaatatctctctggacgattgaagatgataggagcacatcagtggttttcaacaagggtgattttgtctccccaaaggacatgaggcaatgtctggagacatttttggctaccatatctaggggagtgtcactggcatctaatgggtrgagattcacttccatctgcttccattaataagaatgccaacaaaaaataagctattaaactcaggtttgaagaatgctttacagatcattggactaaatatttaggccacagaggaagatttagatttggtgtaagaaatactttcctaactgtaacattatttgatattaaaatagattattactgagagaacagtggttctccacccagttgcacagtggagtcacctgataagctttaaacactaccagtgccctgctctctcaagggagtctaatatagtcaagaatgggacccagtaatgggtactattgtggaagcttccagatttttctgagaaccaaggctaagacccactggtcaaagcaaaagtaagcatcccaacatctgcgcttaaacaaaagaaagtttacttttaggcagaagggtgcgtgaccctgtaggaataccatatgcatcattcttgctcatagtggcsccagcggtgggccttgtacagctgtcttcctgctgttgctgctcagttgaaaaggcctgacagttcagtcctaaagtgaagccaagaaagagaattcagactctgatgctctgatgaagaaatgacctatggaactttcttttctgacccgagtgccagtagacttttgtttaggacagtttcacagcttgtgagaagatgaggagccatttattcattggttggcccaagcatgtgttacagttgctctgaaaagctcagatcaaaaggtaaaggacaaagatggaaaatagccagacatcagacccccaaggatgcccaggattggctttgtcatttccacactggttttctttcactggtgaagtaagatgcaaagagataaaattcccaaaccagcagagggcttaggcaacaatacatccttttttttaaaaaaaaacaaaaaaccttttgcagatatagttcacaaatttatcttttaaccaagtggccgtttctctggaaacaaagagtgtgccttagtaataggacaatcatagattttgtctgcatactaagcatttgaaataggcctacagattactacaaacagctgtataggattaktggccattaagggccagctgaaatgagttagtaaacttaagaaagttcaataaccaragagtcaaaaggagaaggtgatagtaaatcatgaggcaggtggggtctggatagaataggaatggagagggaagaaatttggtctaacatggcgtgggccttcttttcccattctacaggtgaagatgctgaggtttggagaggttgtgaataacagagtccagaacttggatgtgcagagctaggaataaagccaagtttatctcactccaaaggttctttagaggcttgaagtaaaggccaagtcagggtagccaggtgaaatccatgtactggcttgaggctcatgggtgcaagtagctggtccacaaacagacagacttttacattttcaggactactcactagttcttaacagagcctgacctagctgggggtctacatggactccagtaaccatggcatggagamaagggcctggtggggagagaggttgatgtctgggatgaagggatgggtgtgtgaagagagtttaagaagaaagttcttgtggagggaggaaagaacccagaagctcccactaagtttcataatatattttgataagctagcttcagtgtcccatgtaggctactgtaggtagaaatagtctcattttaataaaggtgattacgtttttccttgtgaaaataataagtgttcattatagaaagtgtggaaaatacagaaaaaggaaatgggggaaaatatattcttacttggtaaaacaactgttataaaatctgttgtaattttttccagtctttttctattcatataattcatattattgtgatcatgaattgtatttgtcctgtttgtgttacttaacactgcaaaacaagcatttcccatcttattrgcatttagtgttacatgtaattatatatatttatatataaattattataatttagaaaagttaaactattatatgtgcatatcacctatacctaacctattgttgggtatttagattagaagatatattataatacactccagaatggaataactggaccaaagatatagaagttttaaggacctgagacaatcagcagggctggattctcacttaggaaggcctttttagagtagtacctattcctgggttggattctcaaacttgacatgtccataactcagttttctcagtactgggaatgattagttcttaggagttatataggagttaactaaaactgatttataatagcaatcagacrtaccacatggtcactgtggaactcgttagttctgtttgtcaaatatttctgtggtccatctcccaggcaccttataggattatacttcctgctccctgagggtggctggggcctgtgtctagttctgaggagctatgtttggaagtgaacacttatttacagggggagctctttttgcctctgtcactgtaactggcaatgcttgagagggtggctgctccatcagcccacagtgagaatgtgagcaagaaatacaacttgaagcccctgagacttggaagttggctgttagtgcagcatgccctagctcatcctgactgccacaaagaagatactcacattagcatgcccaacatatttaatctctgtaaatagaaatcaactaaagttaaaagattgctaggccgggcgtggtggctcacgcctgtaatcccagcactttgggaggycgaggcaggcggatcacgaggtcaggagatggagaccatcctggctaacacagtgaaacgctgtctgtactaaaaatacaaaaaattagctggacgtggtggcagatgcctatagtcccagctactygggaggttgaggcaggagaatggcgtgaacctgggaggcagagcttgcagtgagccaagattgtgccactgcactccagcctgggcaagagaactagactttgtctcaaaaaaaaaaaaaaaaaaaaaaggattgctgttaggattcatcagaataaaagaaaaatatgtatttatttcaggtgtttcacagcccttgattaaggggactgtaacattcaatgttaattaagacttcctcttcccrggtagtttgggctgggcaatgccaacatttaccttcccgagtctcctttttacacttttaattttcacgtgtgttcatgtgaagagaccaccaaacaggctttgtctgagcaataaagctttttaatcacctgggcgcaggcaggctgagtccgaaaagggagtcagcgaagggagatatgggtggggctgttttacaggatttgggtagacagtggaaaattatagtcaaaggaggttgttctctggcaggcaggggtgggggtcacaaggtgctcagtgggggagcttctgagccaggagaaggaatttcacaaggtaatgtcatcagttaaggcaggaacaggccattttcacttcttttgtgatttttcagttacttcaggccatctggatgtatacgtgcagatcacaggggatatgatggcttagcttgggctctgaggcctgacattcatgttgaccaagccaacttctgatggtcacggtcttcctttaattggtattgttttattttaaaagtcacaccatacactatttaacaaacaagtactttttaaaatttttgtgtatattgttttgagatggagtctcactctgtcacccaggctggagtccagtagtgcaatctcagctcactgcaacctccacctcccaggttcaagcaattctcctgcctcagtctcccagagcaggtgggattacagatgcccgccaccataaccggctaacaaatgaatactttagaatcaaatgaagtaaaatataaaagacctgctttctccctcccctaccagcccacttcctggagttcagtttggagcatccccctctagacattttctctgcagttcaaagtacaaatgaaatcctactcttcgtattcttctgtgctttgctttttcacctagtttctcgggtgtcttttcatgtctgtgtatgttgattcacccctttctttttaacgaaggcagagttctcagtttcaaagatttatcagccttcacttaaccagtttcctctttgtaaacagttttgggtttttctccagtcttttactattgttagtaatgctccaataaacatccctgttaaatgtatcttttgcacatttgcgcaaattaatccagaaggaaaatctctaaaaatataattctaggttgaaggaatttgcagtttaaatgccagtaaatattgccagttcctttcccaaaggtcaaatcaatttgcattcccaccaaaacagtgtgagaattcttgtctcttccccctctcaaggatccagggtattaccaaacttctagaaatctcttccatcataatcatgaaaaaccatattgcattgtttatttaaagtacattttcttaattacaggtgagtttgtgcttgttctttcttaaagtatgataataccttcaatcaagtatgatgaggctttggtggcattctttctctttaaagcatgctgattttactgcttgaatctcaaagaataagcctatttttaagccctgcagaagcatcttgtcgctgcccctcatttactgaataaacaggttcacaacatttctgagaccctttatatataggtatattatagctaggatgttttacagtgacagcatcaaggcagatggactgggaattgaccagccctccaacctctcagttaattgatgtgacatattctttcattgcagcaattcagttttgtgtccttgcccactgacgtgctggaaattgaggtgaaggacaagtttgccaagagccgccccatcatcaagcgcttcttgggaaagctgtcgatgcccgttcaaagactcctggagagacacgccatagggtaaacctgtgactgagatcttactatcactaggttcccaccaacaggtcgtgcccaaaggtggcctgtaggctgcaatagtatagtctcacagagagtcaaaatggtatcattatatttcctttgtttttcctactaattatgttgcctgagccaacataagtgtttgttatattaaacaaacccatcccttttcacttgatgtgtaacactggttacttacccaagagagtaaaaaatcctattaaaaatattaaacagtattaaaagaagccctcaatggggcatttttctgtacaggtagaaactaaagtttgttttactatgaagaatattatttcattcatatgccagtctggtatgtaagatttaatcatatgtgacatttccataacaagatggaatactgggtaactactgtagagtttcttacttagaagacactagtatctgcagatgctagataacatggataagaatttgaaagcatgattctcatggaatgacagcagttaagatgctcacagaattcaattgtatatgagaatgggtttctgttttgtctcttttacattcatgtccactcatggttctcattaaagtggactatgaccagataacagccctatgtataatatgtatttctttaggtaacagggactacatttgaaaacactaaataaagctttctattgataaacatatacttatatacaatgtaacccttacaaagatagcaaaagaatgagaaaaaaatatgcagaatttccaagtgtcttaatttaaagttctttggattatcagaaggactttggaatcacggataattatcataaagacatttattattaattggaaccttatggtgtgtaggcagcagggtgcacagagacctgccactaactctccagccaaagggagctgagtttatggagctgcagtcacgtgtcacatgcagtgtttgcacttgccattcatggttgtgaggattaaacagacaaaaagtgtacataaagaacctagcacggccactggcacgtagtaggaacacaaaagaaaatggtattccttgtgatcttttttatttcatttagtcctcataatgcttctgtgacagcattatcaccattcctgcacgaggaaacaaggcttcaaaaggatcaataattatgtaaacccaaggcttgtgggtggcagagatccggccggaattcagactcacacctgtgtctctccaaagtccgagggccatccccacacaacaggcttctctcagggttcctaggactgattctgtagtttattgtgggccatgcttttcatttctctccttctctgccctactggctgctctcacagctgttagcacctctgccagggggtgggctggagaacaaaaacaggggctgtgtgggattctttctaccccagcacccagtgcactgccgcccagcatgcattagatagataccagttcgtacgtaaggaacagaacttctctctccagctcgctgcagccgcagagcccctctgccctcccatgctgagttctctcctaagtccaagctgccggctcctatcttcttagcactgtcccgccctccaagcctcccactgtggaaaggcacatccccagctgaaagcaagtacctgaggtggaaaagggtgtccccgaccaaaagaaggttagctatgattttcccagtgttcttgccacccagggaaatggagagcacagatcgagtgtgattgagcttacacctctccaagaggcaacaacagcaagccatggaggcgtttttcctcccaccctctttgatgggatgatagactgccccctggtggcggcgcagagcagctcctcctccaaagccttctgcttccacagcccctgggggccacttctgcagtgctgcctcctccggaggtgycccaccgtggttaggagcagagtgttggggtgatggccatggaagcagtggccatgcagcctgagccatggcagaaccccagagtgcacccacaacaaaagtgaatccactttgcaccgcagcttccctctgccctcagcacatgctctccccataaagccccctgcatccgtggtttctgaaacgtttggctccacctgtactggctgcctccctgccctgagatatttgcacctttcccccctgggcacacatgcactctcatttccaatcctccttcgattccttggcctgtaaaatcccaggcttctgttggctgtctgcctgtaactctaaccatctcaccttcgcattgaagtgtcactggctgtcttgaaccattatttagtggtcctaccttatgcccccagctggacataagctatttaaaggcaggggcgatgtatgacatgctttgtatcaactgcagcacctttcacatggcaggggctcaaaaaatatttgttaagtgggtgaaaagcaaraaaaagaaaagccctgaaagtaaatgcaaagcataataaatgtaatttttgtgccactgtctgattgtctttaggcctcccctgatttcaattaagttttgggttcgggatgtctttgttatggtcataatagacctacttcataatattgaccaaaggctctttctaaacagacaaaatactgaagctcatcctatttttttctgcacataatgctttacttaatggacttctgaggaactccaaacactaaatcatggcttatcaaagaacaatttttaagtcaggggcttgttgggatataggttgtctcataatgccagtgttttctagaaagaaacattaaaacactatcagccagtgatttatctttttattttcatgtcacaaactaataaatggaataaatacagagtcatctgagtaacaactggtttgrggctatgtgtttgttattactgggtaccctgggtttgttaactcctgaatatccaaaggtggtcactcttcctatttaggcccaggtaaggggcaatttactctgctgaagctgcattgttaatgaaaatataatagcaaagtttcaggttgattgcctctagaaagttttctttttataattaagaaattgctttgagggggtggaggggatggcatgaaaatccagggtggagacttggggtccctacatgtggagccctgcaattggtgttaagtggaactcacaagccaaagaattcagcccacgagtcttgctctgctccatcctggagcaggtgccattctgtagcgcccacagactctccagtaaccatgacagcatcctttcttagacattacatatataccacaagatatgcatctgctggcactgtccatcgttgaggacatatttggaaaatggcaatctgcacaggaaaagcaggccaaggacatccgtgtctttttttattytctctctctctgttttagaacacaggttggcaaacttttttgtacagggccaggtagtaaatattttaggctttgcaaggcccacagtccctgtctaaattactcaactctaccaatatagcatgaaagttgccacagataatacgtaagctaacaagcatggccgtgctccaataaaactttatttatggacactgaaatttgaatttcatataattttcacatgctacaaaatgttactcttcttttatttctttttccaacaatttaaaatgtaaaaagctcacaaccacacaaaaacrggtggtgggccacatttagcccacaggctgtaatttgcctaccctacccctgctttagaatacagacagtccgttcaacttaaccattttttgctttacaatgaattcagcagaaaccatacatcgaattttgaattttgaattttgatcttttccttggctagcgatacacaacacgatactttcgtgaagctggcagcagcagcaagccatagctcccagtcagccatgtgatcacagggtaaacaagtgatactgtactctacagtagactgtattcaataaattacatgagatatccaatactttattataaaatagttttgtttttgtgttacatgattttgcatacttgtaggctaatgtaagtgttccaagcacttttaaggtagtctaggctaagctatgatgtttggcaggctaaatgtattaaatgcatttttgaattgccagtattttcaacttttgatgagtttattgggtcataatccatggtagttcaaggggcatctgtattygataaggacttccttacagttttgtattgctgttgagcacatcaggacttccctgggcttgcctgcctcacccackggtatagaaagcacactgcatggtcattaggaagagaggtattgaccagaactgtgatggtgcttatttccttctagggatagggtggtcagctacacacttggccgcaggcttccaacagatcatgtgagtggacagctgcaattccgatttgagatcacttcctccatccacccaggtattttcagcatgaacttcatgtcttgtcctaggctagtgtcataagtgtggttcctttttctaaaatacaataactatggttctctccagatgtatcctaggttttgtggttatcttctccatttgaggtccagaagccagtgatctattctggaagccaggttgctgtccccctgatagagaagctcctcttcattctagtgacccaaaggtacagagtagacagtggactgaaggttaacaatgaggccaacatggatagggagttctgtcttatttatcatcctacccccagcacccacataggtgtttaatcatcacatacatgaatgaatgaatgaacgtgaaacatctttctacctagtaactagatatagactagccagttgctgaagaatgtcatgttgaagaactataattgtacaatgaatttttataatatcacagaaaaacaagaaaagtataaataggacagaaaactccagaatcatccagtgttccatttaatgctaaaacagatttcaaaatacgaatgataagatgcctcataattttatttttgctcttcttctgcagcccccatacatctcaatatagatcatactgagaactgttaggacctcctggaccatttacaagttgctgttaagtctaatgaagctcttgagaacttagagcctggagtttttcactacccactcattaaactccaggtctactttcctgtgccaatatacaacttagattgtaagaaaacaccttgactattttgtcttttcaaattcagtctatttctatattctgagaatacaactgactcttcctttggtgtagccataaggacagctttacagctcaccagagggactgattttctttagtgacttgcactaatgcatttgaaatggggaatttcacatctggcaggaatccagtagaacagctgcaggaaggtagagttaaacactggctggatgctacctcgtgaatggctgcttgaggtgaagaccttgttttttttaaattggaataaactctaaatgttgggaascttccagcctgagatattgaatgactgtgattgttcctattcttcatccagcctttgaagaatctggttgcctgagaatcctgcttaccccttatgccaccctgcaggacctaagcataggaaacattctgagcaaatgcaattaactaaatataatcatcaaggagctataaataacaccactactaccctcatccctggaagtcattccatgtggcaaacactgttgagcacctactatgtgcccagaactgggttagtgctaggctttgggcattttaaccaaaagatgaattccctttttgaatcgtatttcggaaatatatccatgactgcaagttgttgttaacatagcaagaactcattcttacagaatttttcactagagctctggccagtgagaaaccctcatcaacctacattcaatatcctaatgtagaaatcccttagtgatggcttacatgtcccacagggtatcctaacaccacaatgctctcttctgggagaaatgacatatttttcttcttaccagcagatgatgaggagatttccctgagtaccgagcctgagtcagcccaaattcaggacagccccatgaacaacctgatggaaagcggcagtggggaacctcggtctgaggcaccagagtcctctgagagctggaagccagagcagctgggtgagggcagtgtccccgatsgtccagggaaccaaagcatagagctttccagaccagctgaggaagcagcagtcatcacggaggcaggagaccagggcatggtctctgtgggacctgaaggggctggggagctcctggcccaggtgcaaaaggacatccagcctgcccccagtgcrgaagagctggccgagcagctggacctgggtgaggaggcatcagcactgctgctggaagacggtgaagccccagccagcaccaaggaggagcccttggaggaggaagcaacgacccagagccgggctggaagggaagaagaggagaaggagcaggaggaggagggagatgtgtcyaccctggagcagggagagggcaggctgcagctgcgggcctcggtgaagagaaaaagcaggccctgctccttgcctgtgtccgagctggagacggtgatcgcgtcagcctgcggggaccccgagaccccgcggacacactacatccgcatccacaccctgctgcacagcatgccctccgcccagggcgrcagcgcggcagaggaggaggacggcgcggaggaggagtccaccctcaaggactcctcggagaaggatgggctcagcgaggtggacacggtggccgctgacccgtctgccctggaagaggacagagaagagcccgagggggctactccaggcacggcgcaccctggccactccgggggccacttccccagcctggccaatggcgcggcccaggatggcgacacgcaccccagcaccgggagcgagagcgactccagccccaggcaaggcggggaccacagttgcgagggctgtgacgcgtcctgctgcagcccctcgtgctacagytcctcgtgctacagcacgtcctgctacagcagctcgtgctacagcgcctcgtgctacagcccctcctgctacaacggcaacaggttcgccagccacacgcgcttctcctccgtggacagcgccaagatctccgagagcacggtcttctcctcgcaagacgacgaggaggaggagaacagcgcgttcgagtcggtacccgactccatgcagagccctgagctggacccggagtccacgaacggcgctgggccgtggcaagacgagctggccgcccctagcgggcacgtggaaagaagcccggaaggtctggaatcccccgtggcaggtccaagcaatcggagagaaggttagacctcaaacctgatcagagtgagaataggaccatcagggggacaaaggtgtcaccaacagtttaaaaacaagargggcgggggatcggtgtcaaacggggttgctggggcaatgtatgcctgtcttgtatatacatgtgtgcatgtgtatctgtgtatgagcatagatgactgtgagtagctgacaccccacaatgtctcagatacacaccaggaattacgactggttggatgtgagcgtgcacttgtatgtgtgcttctatgtttgttttaactaatcaccagaactggttagtgtacatgttatcctagtcttaacagcagccagagccccaagactagtatcaaatgatatacatgggaaaaatctatctacattaaatggataatgtgtaaatatctgctgactttcaaagcacatggaagattagcaatagatgttaatattagttgaagaacagattttacctctgttttagaattcaactagcccatgtacgtacatatagatatgtctagcctacatatatttgtcattatttatgtccactcaattcttgttattactgttggttttgttttgttgttgttgttgttgttgttggctattttggctaatggaagggaaaaataacatgattgtgtataaatgactttgtttccartaagaatcaaatccaaaagctgccaccattagttttaaaacgtattctgtgttttaaccraagatgttctttcttagtcatgcctgtggaattatatgtgaaattaatttgcatttccttatccaggagtggaaactgtcttccagtcaagtgacagtggtatgactgggaaaaaaaattgaaaagtcacataataatatgaaataattcagttgttttaaaagagaaaaacatagcctctgctattttgctgttctgctgttgaaattagcctccaacaaaaggcggggatattttctctagattgtaagctcatcaagggccagagttgtgtttctttatgtttgaattcttagcacctaaacaaacccctggtgcctacaaattttttttttaacaggagctaaagtgagcattaaaaaaaataattttaagtattcaataatgcccgcttctacatttcagaaaaagagtgagagaaggtggcacatgcaataatgagaaacgcaaggaaattggtagagaaaaagaaacacaggcagaaaggtaaaacagayagcatggaaaggtacccmcaaggagcgggatggaaaatccctcctgtgagtagaagggaatgggaaatgcctttctttcacaaggatgtttcgaggacttcctttattctaggccagatgtaatgcactgggcgcaggaagatggagtggcatcaggtgatgtatggacattactcgataattacagcataattaaaataatacaacaaaaggagattgggggattcccacataaaaggcacacataggagctggcagggatgttgggttacagaggtctgtagatttttcctgtgaagagccagatagtaaatactttaggctttgtgggtcaagaggtaaaaagctaaataactgttctcactaaaaagctttttttttttgtattaaaaagtgtactgacacttttcttagctcagagccatacaaccctgttttagtgcacagttttttggcccccatgttgggagataatctacacatggtcaattgaaacttggctcaatgtaaatttatataagatcatgttttacaaacaaaaaagtcacatccttgccctttagaggccaacagtctagcaggtggaagagcaggaagtgtttcagggtcacagtggacatctctgaattggcactggcagtttctaaagaaatatctaagttcctgaactctgcagagtgtaaactcagaaaaggttaagaagcacctacatgcttcactatggcgatcacaaggggaaataaaaagattcccgaggggtctcttgatctgctgaaggccatgcacacgctggcatgtgacttcttcccagccatccttccccgcctcagcagtgagtccccaggctaaccgtgtctgcattgtgggactgtccttcacttgccaccaggcttcacaacagcagatgcttcaagaaagcagggctttaacatgacctgcctgatacgtgattgtgtgggtgacctctgcttccataaaaatccctattgctccttcgccttgacttctaagattgcaaattcctttactgtagaaactgcattagacggctgggtgtgtgggctcacgcctgtaatcccagcactttgggaggccgaggtgggtggattgcctgaggtcaggagttcaagaccagcctggccaacagggtgaaaccctgtctctactaaaaaaaaaaaaatacaaaatattagctgggcacggtggcgggcacctgtaatctcagctacttgggaggctgaggcaggagaatcacttgaacccaggaggcagaggttgcagtgagctgagatcgtgccattgcactcccaactgggcaacaagagcagaactctgtctcaaaaaaaaagagagagagaaaaaaaaactgcattagattaacccaggtggatttgttgtccacgtgcccacatagataaggctgcaacaatttatagaggaacactgttctaagtctgaactgacaactatacaggctagtattcttttcatactttttgctttatttccctctataaatacctcctttttaaaagtttaatttaaaatagttcttgaaagaccttctgcagataaatgaaaagagtaacataatgtcattgttatgagctcaggccctggagtcaggcctcctggatttatattcactcctcccacttcctcaccaagttacctagctgttctgtgcctcagtttcctcatgtgcaaaatgggtataattacagaatctccctcaaagtgttgttgggaaaatttaatgagatgatactacaaaagcactctgcttcccaccaagtgagggttcttccaggcagacaagcagtgagggtaactgtttatattatgttgtataaagcatctaaaacaatcctttgaatttgcatttcctgtactttataattcaagggaaattttcacattattaggtataaatcactttgcttcaaataatatgcaaggcaacctatctttctctacaattaggttatattatttataaatagaagggaatttaaaacgacgttgcttgcttttagctgaggaatagatctctttctgggaggttctggmgggtttcaacacttgctttgtgtttgaggcaagggtgatgatgtggaaccctgtccttgtgcagaatagaactgcttgcttcttcagtgcctccatccattcagtcggctgagacatgttggtcacatcattgcatttgcttggggttcacaagcaggtgggatcagctgcattaaccccaggcagtcaacaatrttgtatttccactagcttggaggagtaattaacctgattggttgcattaatttcaagaggtaagtctattgttgattttaaagaaactaagttaaaaatgcagcagctgatgacataacaactataccatggttttgtttaatttctgacactaaacatgtatacaaacaaacatgagtgtggtatccacttaaacacagagcccatctttggaacagcagtctgtccacaatgaactgggtgccggcatgaggggaaccttccttgttttccattagcatctccaaggacccagaggatttgagtaacatagcagaatttgctcaacaaataatgttctatatttaacatttaaaaggaccctttgttcctgaatatatctctccttctgtttgccagtgagctctaggaattaaatcacaaaattaaacccacctttcttcctaattaatttatttttatttttgatcagttccgtagaactagagtgagaagaaataaccatcctttccatgtgtggatattctaggaaatattcagcatttgagatcctacaaccatttgaccaccatttttcagtctctctcctttttgacccaagggataatggaacacttgctatttgcatcagcagaggacagaagaaggaaaaggcctgacctttgccctctggcccttaaaggcttttgcaagaaaaccagcatggtgtgaggcaggaggaaccatctgaaaaaagggccatcctttgtcccgggcccttctcactctgcaaagatcaagagcactggcctctgattatgtgacccaagcagctggtgctgcaggcctgccttctgcatggctgctctacatgcctgaggacaccacttcagaacatcgttcagttcattataagtccgaactgagaacagtataagctatgtctgttgtaggttttcttttaataatctgaggcatgcatcctgtggatataatgtttatttctaaactttctccatgtttgtctttcttcctccttctttcccatttctgtgttttgagctttcctgtcgccgtctttctgctttttatctacttcctttgtctcttgtcctttcctctttccggagcaccctggcttgtctgatttctcctcaaaataatctggacagtcctgagatccctcagccccttggctcccctccccaaccccccaacctccagctttcctactacaggaatttactttcttggctcgccagctccttgacctgtcttggtaccatctaagagttcattcccctcaaaaatctgaaaaacagcctttcggcagccctgtgatgaaacctatccaagtgaggaggtgtcattttgcataagcccaaggaacttttgtggaaccttataaaacgctgcatttccctcaaacaggcctatttcctccactgggctaaaatcaggctctgctaattttctcttgtgttcctttctggtgccrctttctgattcagraaattcgggtcattacagaatcagactcaaatcctacatattggactgtgtggcgcagatcattagttatgaagtgttttgattttcttcttttttaaaaaaatatttcccccctcacgaatgactgtgaatgtagcaaactgacacacacrcacaaatggatttcccactctttggggttgtttcttgtagtgcttagttttacagtcatgcttttttgatgatgttgccacggcagtgaatgaatctgaatgtattgactatcttgtccgtaggtgaatgtcctatactccataattcccagccagtaagccagcttccttccctgaggcctgaacatcatcactacccaacaatcgatgagcctcttccaccaagtaagctttagtttttaaaatctgtgtcttaactcttcctatcaagtctaagcaggtcagtatgaatttgtgtgtaaacatctaaagtctttcccgactccgtgccttacagtgttaacaaagaccaatatgacacctgctctaaaaactggtggttttttgggggtttttagtttgtttttttgactartagtttcaccatgtgatcttgaagagataacacagtgttttcagtgcctctcaacttctgaaatggagagcatttctctgttagacttgactagtctttgcaaactgttcatgacctttaagtcccaaattttacattttatatttaaaatttgcagttcaagatagaataatcctattgttctccattggatctgttacgtcacaagcatctccatatgttaaaacaacttcaacccatctgggcacatgaacttgtactttccttactataacttscatccatagggaatagcttcaaatttcttctgcagttcttaggggttgccaggcaaaatatcatctttaagatagaattcaatgtcagtttctcctggtaactgtagtrggtaattaataattatctaactagtcatctgaacttgggaaattcatttaatctctcagggacttagttttctcatttgtaaaatttaaaaaataaagtttaaatgtctccatctgctcaatgaaagatttgacctagatagtctctagataccattctagctttaacttcataatactccatttaataaatttataggaagaaattgataccccagacattatatattcacttggcatcacatatgttcatgaattctagaacatctctgttttggttttgcttatttttcaagcaaagatagtatttaagatttgatagattttacaactacgaaatctttccagaatgcaaggamccagtgtttctttacattcttttgcctgtgcttacatgaagcagttacagttttcaaaaggagaagtgcttatttcttagttcatctgttcttggtaatgtgctgtactttacaggaacaccactcctctccctattcaactgtaatttattggtgagaaatcaaagaacatcttttatatgtggactaatttaaagaaacacaatatttgtttttcaagggcaaagccaaacatcatgtccttgaacttttgatgcctgatttctttctttctttatacactgatttatggacattctataaatgaagagtaacattttagcatcactacaaatacttcctaggtaacatttatttgaaaaatatgtataacatgttatctccaggaaagggatgctttccccacaacaaataacctttcaatgcatgaatctacttcgaatctgtgcagtacagatgactagttatacatgcaaatattataaatgattgtacataaatccgttgtaaaataattgctttatataagccactttcaataatgagaacaaatttctccagacagctttcagttttctatccatataacagtgaaagaccttagaaaaattggtaatgaatcctaccaactgaatattgttaaataatctcaaatagtacaagaattaccttattgctgatattcattcattcaacaaatatttattgaatgtttrccctgtgctaggtactattgtgggtaagcaaaacaaagattcctgccctcatggagcttacagtctagtctggaagacagattagcaaacaataaaataattaaacagggactggcctagcataggagatgctatggaaaagcaaaaatagaccagggtgagggatctctgagttcgtgtgggggtggctggtttgcagttttaaaacaagtggtgagaataggcttcattgagaagacaacacctgagggttaggagagttatccctgcaagtgttgggcaggaagagctttgcaggcacagggaatggccactgccagtcgggagttggaaacaccctgctgggtttaaggaacaggagaccagtgcatctggagcaaactgaggaagggagaaggcagcaggtgatgtggttagcgaactagcaaggcccagatcatgcagggccttgtaaaccatttaagggctttgtaaatcacttaagsgcttttactctgaacgaaaggaggacattgtagagttttcagcagagaagtgacattgtctgcctcaggttttgaaaagtttgcccaagttgctgtgtagggaataaattgggaagaggaaggatagaagcatgagattcaacataagattatgtctttatgcaggaacccaggtgacaaacaatagtagcttgggccagggtgggagcagtggaggtggtgaggagtggtctgattctggacatatattttaaaggtagatttgatgacagattggatatggatgtgagagaaagataggtatcaaaaatgacctaagagtttcaacctacaaagatggagttgtcttcaactgagttgggtaggaaagactgcaggcagagcaggttttgatgggaaggatccaacacttggtttcgatcatcctgtgtttgagatgtcatccaggtagtaatgtcaagaaggaaattgaatgtgtgactctgaagttcaagagaaaggtctagactatgcaatagtattacatttgttaaaattgttcaaaatacacagttgtataggtttttgttaatataataactaaatatgatacattatcaggttctatattgttcttggactttgtggagaacatataatttagtgtgcaatagatcctttggtcacaaatgaattgacctgacctgcactgctataacttgccccagaatcgtgaaggtactgttttcaggtggctctttagacaaacccatggcatcacagtgctgagcccttcaagtcatgctgatgcctgaagttccatttyraatttatttcctttggttataaaatatgtgaaagtaaattctttacaaagcaacccagaaaacatgttcataatttctgattacacttagctattattttctgaatacatatgagtatataattagcacaatacattccaggtatttaatgtattgacaaaagagcccagctgtttggcttactacrcttttccatgaggaattgaaacatgtgatgataaattatcattattgcagcttcattttctagctttttcccttaatttataaaagccaacctttgtctgcgaaggacccctttctttactgtaggttcctggagggcagggtcatgtgtcactcakctctgtgtcctcaggacctggcacagtctctagttcagagtgagtgctacacagtttgttcagtcaaattaaattccacaatgctcttcaaagactaatgctcattttttgttggatgacagtcatgttggattcaagaaaaatagttgtcctactgcttttactaatattagtttgggatccattaaaatttttaagtttctagatcaagattaattacctagtaatcatatgtatatacaatttcatccatgagctaattaccatttacacttaacacttgacagctggattatcattagataatcattagatctattttawtcaaaatctcctaggacatatttatacaatctgcctacatttttccttcaatttgtctcataagttaagtttggtgtttggggatactttggtttttactgggcattatttgacaatccatcaggtcaagcataagccatcatgccacaaacagatatactatgtacatataaaaccataaatatgccaaatatattttttcccttaaaaaaatgagagttgctatgtcattacctgaatgataagttttcaatgaaactgttagtatctgacctactcccgaaagctatggcttttctcactgaaaaggctggatggttttcctccttttgcagtcacttttgcttttccttcttcttctttagtcttgtgcattttcagcataactttatcacactgctgctgtttccacaatgtgatatgtggactctaaaagctttgcccatctctgtacagcaggcattgctcttctatgtttcgctcagacgtgaacacattgcttccagctcttttccacccacctcaccccagctcagcccctgcctgtattatgtagtgaatcatccatgcttccacctttttgttttctttttttttgttttcttttgtttttaatttgggaagcaagggaacttttctttatctcgggctccctctacagtttgtgatggttatttatcaacaaaagggtacttcctagttactggtttcgtttggtggccagagatatttgacagctgcgtgttgaatatacactgttaattaacaacttatcaaaacgctgttttgaaaccctaacaatcatttccttccattcacccactcaaaaggaaaggcaatctattaagtttactaagtataagacagaggtcatctaaattcgcacatccaagattttagaacagtagttaaaactggctttaatctgagggccattcttctctccactgaacctaatcgccctctgttagacttagcaaagaaagcrttctccagcatcacagtgtcagctcgcactggaggataccccaatcttccacagctgtcgtttgagtagccaacaagagtgacagtggtgatggacatttctaaagaaataaattcattaaacagtagattttctctttataaattattagaatttttrtattcgtcacaccatcacaccatcacgggtgtgatgacccgtgcctgtaatctcagcactttggaaggctgaggtgggaagatcacctgaggtcaggagtttgagaccagcctgccaaccatggccaacatggtgaaaccctgtctctactaaaaaataccaaaattagccggacctggtggcaggcacctgtaatcccagctacttggaaggctgagtcaggagaattgctcgaacccaggaggtggaggttgcagtgagccaagatcgcaccactgcactccagcctgggtgacagagcaagactctgtctcaaaaagaaaaaaaaaaagaaagtattagaattttaacataggtgttgatcaaggaaccacaattactgtttaatatggcccagcagagagtctaagttcattaaattgttttctgagctcccgagttcatgccagtgccccagaagtcgtggtggcaggtgctgtgggcagggtctggcctgcagccatgaaccaatggtgagttctacctgcagaagacttggaagttgtatgtgtttcacgtgggtcagtagtttgtccttgatttttctttttgcctttttattaaacactagactgggaagctcgaattgacagccacgggcgggtcttttatgtggaccacgtgaaccgcacaaccacctggcagcgtccgacggcagcagccaccccggatggcatgcggagatcggggtccatccagcagatggagcaactcaacaggcggttggtgatcagtatgcaatgagctcccctaaaccacagtgaaaggagaatggcagctagagacgctccccttacacttttctgctcagacngtatgaggagactggaaagtaattaagtatcttaagaaacctgttcctagtaggtatttggaaagctagatttagaatttggaggcgagagacaagttaagcttgagtgtcatttaaggatgggaaatcgtctaaacttcttaatagcctaggcacaaaaataggagtttttaaccaagggccagtgtatgcccctctcctgcgatgttcaccaaggatgtcagtgttccttgaactttccaggcactgtacccaaattatacatagatacacatttttctggcagactggtccacacccatcatacagttctcaaaaggatagagacctcagttaaacacattccaaggataggttccataagaaaactaaaagctgcttggagaataaactgtctcataaatcactgtatgcattcctaccctgattccataattgatatatgcccatcaataataattcttgaaaagcctgcatcttagaaaaagaaatgtttacaagcattttttgagaattattttgttgaaaaactaggccctctctattgaaattgtaaagatgtcattttgtttttaacctgcaaacaaagccttaaacagtatcaggcttaaacagtggtccattcatgtcagagatgatgcagtaagctagtataaagcattgtctctgacatcttgctctttaagactggagtggcagcttcaggatacttttaattaccaggaatgcaaactgaggcttccttcagttgaaattgcacccacatgctgtcttgctttcatgtcaagtatgaaaagtatgaaggtgaaggaaaagttgagaaagacgaaaaagaatgaagaactgggtttgtggaacacacctactgatagcaaatgcctttgagacttaactgttatctgccagaaagaaaaggaggagaaacaatttagtcctattaaaaacacatggggccgggtgcagtggctcacgcctgtaatcccagcactttgggaggctgaggcgggtggatcatttgaagtcaggagttcgagaccagcctggccaacatggtaaaactctgtctctactaagaatgcaaaaaaattagccaagcgtggtggcaggcacctgtaatctcagctactcaggaggctgaggcaggagaatcgcttgaacccgggaggcagaggttgcagtgagctgacatcacaccactgcactccagcctgggagacagagtaagactccatctcaaaaaaaaaaaaacaaacaaaaaacatggaaacaaaaaaataaaaatgaacttctgtttactgttgtacacagaggagcatgctttaggtgaaaatcaccagaacattttttcattgcctgagcgtttggaagacatttgctttccacttttccccatcagcagccgagtgttttaagtcattaacaaaaaccataaaagacttgcattggcagcacactttacaatcattctcaccccaacaaagcrtgttacagagaggaagtcctgataacccagttttactagacatgaatggaccaaaaatccatgggagagtcctttcatggtgattgcaacaagattcgtgtaactaaaaatgtagaagacacagtaagctcatcttacatagagaccctgttgattccataggcagaagttagcccctaggtctgtcttgccraaaatgataagctccaattgtttagcagagaaacaggggagggtatcgtcaggctgtattcataagaggtactgttttgaacactaaccaaagcaagacaatgaatctgaagcagaaggaagcaccttgacctatggcataaacccatgaaagtttatcggggtgatctgcttgcataatataaaaattaggccaaatccatcctgaaccaggtctccaaataagttttatagcctttgatatacaaactcctgtgccctccagtggagatgaacatgctgggagaggcagctggaccttgctgaataggaagttgcatttgctacatccatctggacagayaaaaagaaaaggaatttagcactttgagaaggtacttatttcttgtgaaaaagcatacctagggaagatcagataaccttcagataagtatccagatttttccatacttaacctattgctttgaagcatttaaaattttttgtatttggcattataacaggcagcccaagaaagtacatttccagtcttctatccatctcacatgcgaccacacagaaagtcgtttttttgataacccacagttatccagagaaatttacaatgattactggctcacagccatgtggaagtattattcagtgttgcaaggagtttcccttgagctgaaccagatgattgtgaaaatcaaatgtgtttgtgcaaggagacataaaactaggaagtacagagtacacaatagcaatcaatgtgtaagcttgtgtggtaggtcgcagtgaccatgttccaactcagccattccccagacgcggcacactcttccaggcctttatggcttggccacatgctcccatggcaggaaaatgcctcccacctgcctcccacctgaaacatatctcrtcctacagacctgactcaatgtcgtgccccaggaagccgtcccagaatccctcacacagagccagtgacttcctcccctatagcttctggaatgtgcctgcctctgtgcctgttcttacctttttgccttactcttctttctacccttttctgctcccagcacctagtgtggtaccagaagtttaatactactcagtacaagatcattttctgagttaattcccatgctttcagaatatccagaattaattaattctactttcacaaatatttactgaaaagcagaaaatataaatatgtattcttattttaaataatcaactgaagttttgttttttaattatttgtataaaattatgataatttaagggaaatagaagttttaaatagaaaaaagtgatctacactctaccccaaggatgatttagttttttttttttgagatggagtctcactctgtcgcccaggctggagtgcagtggcattatctcagctcactgcaacctccgcctcccgggttcaagcgattctcctacctcagcctcccgagtagctgggactacaggcatgcaccactgcactcagctaatttttgcatttttagtagagagaaggtctcaccatgttggccaggcttgtctcgaacccctggcttcaggtcatccccccgtcttggcctcccaaagtgctggaattacagacatgagccactgtgcccagccaatttagctttttaaaaacatgtatccatcttcaatttccatatgcatgcacaattcttacatggttatgatggtgatatgtagttagtttcatattcttttttcacttactacactgtaagcatttaatattgccrcatagtcttcaggttaacatgtaattgcttgtatagtattccactgaatggctgaagtttagttaacctgatttcatattgttgaatgttttgcttattgcttttgtcactgttttttgtcacaagggcctgctaaatactragattgccttatagtggagggtttccttagggttctattcccaaaagattaggccaagggagataaatgtggatttggcatttggtatcaatgcctaactgctttctacattagacattgcggttctaggggtttattctaccaacagctacagcttcacttccatcttatcttttgatttgtttttgttgatgtaagaggtgctcctcgtattttgatgccacttacatttcacttgttggagcaagggtcaacttgttttccataagcttttctttaataaggagtagtttctcccatgtgaattgtctgttcttgggcttttttaaaggggggaggttgtgtagttggctgattggtttggcttggttttggagggcttttttccttcttgtttggctttgtacgtgtgtgtgcgcgcgtgcgtgtgtgtgcgtgtgtgcgtgtgtgtgtgtgtgtccatttacaaattatgtatttcagctgactttctagctaattttcattagccctctatctattataaatatttaaccttttgctacaaaaaaatggaggaggatattgatggataattcctaatgaaatagaagagagctgcctccctctcctgtttaaagctcgggagcctctgaggctgcagtcctgccctgaaagactgagagaccctcctcaagtcactgcatgacctgcttccccaaactgcctctgtgcttcggcagaggtcagacgtagggtcaaatgcaggatttgaggctgttgactcagtaaggcctgcaataaccaaggtccagctgaggacatgtgaagtaggttgtgacactgctgacattatcctcatcaaataagatcatatttactcataatgctctgctgtgtttactgcatattgggaaggaaaggagaggctacaacttgacatttgtctaagccctattccaggcatctgttgctgagtaaaactacaccaaacgtagtggcataaaacaaccacaaacatttcttcttaccgttatttctcatggttctggtttgattgagcccagctaggcagttctctcccagaatatctcctagttgcagtcagagggtggccggggctggagactcacatattaggaggttgatgctggctgtgggctgggcctctcagccaggacacctgcacagagactttccacgaggcctgggccacctcagagcatggctgctaagttccatcacgaactgttacaaactctattagtcaaggtagttgaaggggacatggattctaccttttaaaaggagagatacagttctggaagagcatgtgggtctaaaaatatcgttgaaccattttgagaaatgcagtctgccataaagcatttarggaatcctcccagtagcagctgccttagtctttggcaggccccgttccctgccttggtcaaggtcacacacttgggcagcttcttgctggcaacccctgctttcctgccatggctacrttccctgagtcctcagcagagagaagatcacagagtgccatccttcaccatccatcactcttcataacctcccaccacagatgtacggggtggtgaattacaacaaatgwttctctctgtaattccaccaccactcagctcattgcccccttccacattttgttctaagaggccggctcaggaaatgccttgcagtaaccactacaggcaaaggtggcttctgaaaggtgtcagagtgagtgggagtctctccagataaaataaaactgaaagaaagcccttagaccaatagttctcaaacctagatataaataatacttcctaaagaactcgttagaaatgcagatttttcttttgcttcaatttctgtaactttaacaatcactcagatgatgctcttgcaaatggctggagactacagtaaaaaaagctttcctctgtaaggtcaaggaaagagcggggcactggtctgcagaaatcctgccatagtggagcctcatctgtgcagcgagcatccccgtgctttcccacctgggactgcacttggagacaggctattccctgctaccttgtctctcatcctcctcctcctcttcaccccctccctccaccccttcattgctttcctggagacaaaaagtctccaggaaagtctccagcctaggctgttgcaggagcccccagctgctctccacagctcccagctcctctcctccagtgcattctccactccgacactggatgatcaatctccatgtacatctggccctgcctggtttttttttagcagccacccatcaccaagagcaatggttcattctcaagattgatccctgggccagcagcatcaggatcacctgggaactcatcagaaatgcacattctggaaaaaaaaaagagaaaagraaaaagaaatgcacattcttgggccctacaccaaacctactgaatcggagactcagggggtggggctggcagtctgtgttttaagtcctgcgggtgattctgcgtrgctcaggttggggaacctgtggcctagagaataacacccatcctactgcagggcgccctctggggctccctcttccctctccactggtctcctggccctgccaggtgcccacacatcctgatgccgctgccaggcatctcagagctccccaagggtggcctgcttttgtacatgttgtttcttttctgaaatgccctttcccaacaagctccccaacaaattcatactccagcttcacaatttacaaaccttgggagtctcctcatctgtgtcccacatacctcttgcctgtctgtgacagcctttcacctggctggagttatggcttctgtcccatttcccttttgttacatctcgactgtgtgtgtttaaagggcaatgtcatattctaatcctctcttccatctgaaagtccagcacagagcctgcacacattggaagggttaggaaatatttagtacttggcaaggtggccagctggcaggccaaatgactaaatccccaacttgggaagaaaaacaaaatgagcctttgaataagcagaaaacatttatttatttgccagcatgctatcagatgtaatatttccatgacctctgcccaattatatcaattacccgacaaataaaactgagtagaactgctagcccagtttgtacacttattacaataatgttgaggtaatttgatatcttagttgtagcattttaatttacttcccacactcttattttagacttagcctgattttgtttaatgcagggcacaggctgttttgcatgattagttattatttgtgttgattttttaaaagtcgccatacttgaaactcatcatagcttgcaaaacaaaaagaacttgaatcgtcttagagatacttgtcttgctaattgttctggctatcttgtgggaattttaagcatttctttcctgacattcaagacaattctttacagatttctccaattatctgattcagagttttggcccccaaggagcaaaccaaagttaactcctgtctttccattttctaatgcaaaggtatcaaaacattcagcgaaccattgcaacagagaggtccgaagaagattctggcagccaaagctgcgagcaagccccagcaggaggaggcggaggtggagggagtgactcagaagccgaatcttcccagtccagcttaggtattggaggaggggtccccacaacctgtgatggctttcaggggctgtgtgacagagggctacaagcctcccaccctgcctcatggggagcaatgtgccccagggtgaagagagtggaagtccagggtggaggacagaggcatgcctggtgcccgcaagggaaagcagacagaatgagcttcccaccaggaaacttaggagaagtgatcacagtgaaggaaacaccaccaccctggcatggggatctggagacaggaaagcagatgaattctggggatggagctgagtttgctacagtgcttgtggagcaaggcaactttgtcagtggctcaatcatttattgttaagtaaatgttttatttatttataagttattgttaagtaaatttattgtatttgttggtgttctaaggattttttcacttataaataaaacatgcaataaaaattcacagtatattgcaaaggagccatgtgacaacactaggaataatcacttgtttgtagaataaaattcagttcccccaagagaggaacctgggagtgaagaggttttccagcatgccacaggagggaattttttcccactacagtaggcattcaccttggtctggttttcatggttttcatttctttgaatttgcccaagtgggactcagacaaggataatcaaaaggcatgagactggcttccacttttttttttttaacctgtaatgagataagattatcacagtgacatcctaataatccactttctttttaagttgggtaaatgatggcagatttatttgccaaaagaaggcttagagaacagtctgggcaggcagcactgggattccaatcctgccaggtcttagctgtctacagcaatgcagaatattggacattttcatgtgatttttcaaaatgcacatccacagttccaccaccaattttaatttccccctttctattcattttaccaggtatgctaactaaactgactagtttaggtttttctgttattattattattattgaagacagagtctctctttttcacccaggctggagtgcatggtgcgatcatagctcactgcagcctcaaactcctgggctcaaacagtcctcccaacacagcctcctgagtagctgggacctcaggcatgcaccaccatgcctggctaattttttcattttttgtagagacagagtcttgctatgttgcccaggctggtctcaaattcctggcctcaagtgatcctcccgcctcagcctcccgaagtgctaggattacaggcasgagacatcacacctggcctgttattaatttctttgttcaaacttctgagagagacatggtacaatagccaagtaactagaaacatgaggraaaagcagcagaaagtttatttctgagtttgatattaaataagttggcatttactgtatagaaaaaaatcccacaattagtggctgaaactcacagccatgcatctaccccacagttctacaggttggcaatttgagctgagctcagctgggtggttcctcaggatgctgctgggctcacctgtccatcgtgggtcagctgcggagtcggccacaggctgacctgaratggctgccactagggtggcttgttcctgctcctgtggcctggtggcctctcatcttgcagcaggcttgcccaagctcattctcatggcagtggcagggttaccagagagtggagacacacaggtctcttgaaaccctgatgcagaactgacccgttgtcacttctgacatgttctrttggttgaaacaaggcacaaggccagccccaattcagcaaggggaagagcagcgaagtcccaatacaactgggtgtggatacaaggaggagaggaattgtggtcctttctgcaaacaatctatcacagctgtggttagcaacttgtgaaggaaataagaaaaaaatagccaggcatggtgctgcatgcctgtagtcgcagctactcagcaggctgagtatctgggaggatggcttgaccccaggaattaaaggctgcggtgagctgcaattgcgcggctgcactccagcctggatgacagagcgagacgctgtctcaagaaagacaaagagagagagagaagaaagaaagaagaaaggaagaaaggaagaaaagaaagagaaagaaagaagaaagaagggagggagggaaggaaggaaggaaggggggaggagggagggacagagggaaggaaggaaggaaggaagggggaaggagggagggagggaaggaaggaaggaaggagagagaagaaagagaaagaaggaaagaaagatgaaagaaagaaaaagaaagaaagggaaagagagagagaaagaaggaaggaaggaaagaaggaaggaagggagggagggaaaagaaaagaaagaaaatcattgtgataaaagggaagagatgttggaggacttgagccttactgaagttatgcgaaacactactaaggaaatgatgattcttaactgacatacataaagtaatgacacttggcctaaatccaacagtctgctgtgtgggtgaaggcttgtgtgctgccactgtcaggagcgaagtacagaggttgaaatgcctttttcccaatgmattctgttgctttgcttcactttttttcagatctaaggagagargggtcactttctccagtgaactcacaaaaaatcaccttgctgctgcagtccccmgcggtcaagttcatcaccaacccmgagttcttcactgtgctacaygccaattaygtgagtgccctaaaatgcagaggggrcggcctggctcggcaagacccaaaacacagctttgtaaagtcatctgatagatctaaaagggtagaattttaacataagcaagaaaaaacaaagaaaacagctcagtccactcttttgactatccgtgagtctcccaaaaaggaaaaaggctggatttggaaatgctgttgcctctttgggttttttttaaggctgaaatgtgttaatgtcagtgaaagtgctttggaaacaaacctgtttttattattattaaaattttaaaggagcaagattatgaattggccagattcccttcagcctaatcattttataaaatcattttcacygatacaatttcaaagcagagttcttctaggtaaataactaggtttccttttgatatggttttttcgaatatcgtgctgaagttaaatttcatatgattttacatatgtagttttttcattgcttttttggtattttcaagaaagcaatggcatgatatcactatattcattaatttttccattcaacaaacattttctgtggttcaggctcagatctaggtgctggagtcacaaagacagattaaggtgacacctaaagagtaggagttcccattttgaggagcaatgacgtgaaaaacatcagcccagtgtgacaggaccaggccgaactgagggaggacagagtgctctgggggcgccagggagcattcttggggaggcggctgaattgagtcctgaaggtcgaaagtggacaggaagaagtccaggcagagggacatctgtagaaaggatgcacccgtgaggaggcctgggggataagtccagggtggtgagtgtgggtggctggcaggagggagaggggaggaggggcttgagattgggcagcagatcacctggtaactcatgcaaaggagcctgggtctactgcagcaggccacaggaaccaagagtagcacttgggctgcctgaccagaggggttgatgatgcattttctctggcagagtgtcggggagagactgagctgagggggttaagacacaggctgattcaaccgctgagtgagagatgatctggctctgacctaaggaaggggtgggagcatggcaaggaatggctccattcagggacatttctcgtggactcagcagcacttaggtccaccgtgatcacgagtgggtgcaagatgagaactcaaaaaagacagtgtagtttctgctttgggcacctgagtgaggcagtgaccgcactaagctggaggtggagtttgactgggtgatggagggcgtggctgcaaagggggggatcagtttttagcaggttatttctgagaagcctgtgggatgccctgggctcaattccaagcagctccccagaggtgttgtggggaccacagggagaacgcgcatggcacatggccatgccccagccctgggtgcaggtggcactgggccagtaggtgccactggcccaaccccccgtctacacgtggtctgtcctttcaccacccgcccccaccacacacacacacaccaaccctgtgtaccgtcacattgtcatttctttcttcatctcttcccatcctccaacccccctacacatacacacacacaagtttttacatagggttcaaaggaatgacagacctctcatgtccagccttcaatccccagaggccctaaattaatgctccccattttagacaagtaggaggaccaaaggcagacctcaatagtcagagaagggaccatggaggagagagaggagtgaggctcaggcaggtagagggaggccaaggagagccaggcatggctgagacagcgagaaaaccatgtggagtcgcacagagaggtgggccgtgtcccaagctgcacagcactcaggtggaacggatatcacagatagtccatgtgggccaagggggcatgattcaatgcacattcactttttttttttttggagacaaggccttgctctgttgtccaggctggagtgcaacggcacaatcatagctcactgcagcctctattctcagactcaggtgatcctcccacctcagcctcccaagtagctgggatcacaagcacatgccaccatgcccagctaattttttaaattttttgtagagacagggtctcgctatgtagcccaggctggtctcgaattcctgggtgtttacttcttgagcaagagctcattttctgaggcctctacctcacactcacaataaactgctgtgtcacaatcacacttagcagtgttagggtgctcatagtgtgcttgctctatgtttttcctaattccccactccttaccccgtccgccctgacctgtctcagagtgcctaccgagtcttcaccagtagcacctgcttaaagcacatgattctgaaagtccgacgggatgctcgcaattttgaacgctaccagcacaaccgggacttggtgaatttcatcaacatgttcgcagacactcggctggaactgccccggggctgggagatcaaaacggaccagcagggaaaggtgagtgtgacccacgtgcggggctttcatcaaacaggctccttccccagggtgaagctagcaagggcrtgaggaggagagtgtggggaggagttatgtctgagagatgtgctatcggccgccagcagtaaaggggctgataaccacccacatctgggtttctcaacctcagcactactctgaggaataccctgtgccttacgggacattagcagcactcctagccctcacgctgctagatgccaactgttgtgacattgctatgtgttccctgtaattaagaaccactgtctacattttttttaaatttaggtttggaatgtggaactgaattctgtccaatgacctttcggttgtttgcctccttagacagctaactctcaggggatgaactcattggttaaatgcagtgacattgttagattatttgttgtgatttctctaatacaccttaagttttctgtaaaacagcctaacaagcagggtggggtgtgctaggcccatgtgatcttcctggcttacattttgcttctgtataaccttaacccaaactgggtcttcctggccatgctttagaagaccagctgagtctgaaaacaagaaggatttttcctaatcttcatcagccatctcgatgtattcaaaggacaggccaagtactagaactgaacctgtgtaaccttctatgaactttaccagagagaatccctccctctttatggtccaaggaaccagaagctttgcctgcagtcatgtctgtgacgtgtcctttcctctgtgaacrtgggcctgcaaagccacgttccccaaagggagctgatggggcatcaatgtcccctcgaagccatgagtctctctcctataaaccccttagtatgcctcagaacctggactctctggagtgtatggggaaagaatgggggactcattacaagtccattcataaaatgaatctccaggaccagctcctctgtaaccagggatgaattaggggaggggaaaggacatgtgtagtagaaaagtcactgtagccaggatctgctccctgggaccttctcattgactggacgtggcctctgttgggagagtgacaatgatttgtatgtggggacttggtgatatgtattagggtgggaaaatgaagcctgagccagaacagaaagtgaaggagtggcttatcagagctcggtttcgggtagccacgtttacatttattgcttaaccaggatgccaagatgacaccaccatgttcatcatgcaaacagcacacaccaatgtgaacagtttgccgagccttggatttccatgactgcagcttttgcaccaagataaggatgacagggagcacagtggaatgacaaggaggcttcccaatgcaataagccctagttctccatggcacacatgcagatgatgtgacatctcctggtcatcacaccagcagggaagcacagagatgcactgtgagagttttgttccatttgggaatgcatatgagggaatttctgacaagacctcttccccctaattctctttagcaagaagatatcatacatgagaaagaaaaaatctgaatttcaaatgagaagactttcagttatgacacaaactagctgtgtgcctacacacacatgctmcacacacacacacayaaatggtctcagcaatttcttattaattgaacacacacacatacacacactcatagttacagaatgtctaagaggcataccatgtagtgaattgctggggaaagtagccttagacttgcaatgtattaccacagtccatagggtggtcagagaggaacaaaggaggatagtgggaaaaatacatggactagtccatctcagtctaaatacatgaccctgtgcaagtcactccacatttctgagccttaaaatagcaacagtaatgcctatgttgccttcatgattttacaaccagataaataagttaataagttaatgaaggaatgattattaatatcatgacagattagtagtatctaccactttctcttaatgtccccaaaaataatccaagatcaagattgtgaagtgggggaaataaaagaatatctcattgccaaagcccattgataaggggmatagattgagaaaagtatgtttggaccgtgtcttacaggtttcaccctctaacttggaaaggatatgctgcacaggaggctgagagttaggaatacaactcactaaacagtggggtggccatagctcactatgcaaaagccaccttcatagctggccagagcaggtccttgcccctcaccctggacaatctgcttcttgctttatctacacattcaaagatggcaacatttgcttttattatccaccatggtaggaagtagaagggatgggcagagctgtttggtgtctttgaatgcgtggtcatctctacaaaggggacagaggtaagcagctcagagctctgctgcttcaggaggaccggggcaaagaacacgctggcatctgactcatctgccatcttcagagtctgagaaaggaggacagagccttctgcccaattttatagagattgcatgtgtgcctcaaacctcattccaagtctaagctgagggaggcagtcaccatcagagaggtagggtgatgggccccatgggtcctatcttgtggcagacatgagaccaaggcagcctctgctaaggaatgaataaataaaatgagaaggggcytaggaagagacactactgcaagaagcaaacagaatcttggtctgacaaaaagcatgtctttttttcagaaagtrtatttttttcccagaaagtataattttctttggaaaatagaactatttaaaagacatctattcatcatccatgaaatggtacaggagcacatgacttctgttattaactaagaggaaaaagccgcaaacagaaaacaagctgagaggaaacagacataagtagtctgaaaatagctgttttaagattgcagggaaaagcaaaaggtaataatagcatagggataaaacagagcagcactgatgctatgtgaaatctcatcactgatatggcgtatgaacacggaaacagcctctaaagcagaaggaaggaaccagatttcaatcagtggaggagacagtaaaaaaaaagaaatgcaaaaactgaaaaaagaaaaaacttatcttctctatgcctgtcctaaccatccaagttaataccacgaccttccctgacccctaggccatgtgctcccccatgtcacttacacatttattaggtttattgcttattgtctgtttcttgtggcaggattttaagctttttaagaacagaaatctttgttttgctcattgataaaacatcaagggccaagaatcrtgcctagtatatagttggcattcaataaatctctgttgcaccaatgacttatagagttacctgagggaagaaaccagaatactaggtatagcaggaataattaagtattaatgttaattatattaaataaatattaattaaatattaaaattaaaatgttgctgatttaaaacaaattattaaggtgagcagattaattgggctcactaaattacagtaaaggtaattaaaatacattatatatctacacatgttctggaatgtctttaaatagaaattctttaaaaatcttatcaatatgcagccatgataatataaaagttacctacaaaagattaaaaatcagacaagcttcaaatttcccatcctaaaaatgaaactagagaaatccacagacacaaaaacaacctcatgcaaaatcagagtttaccctactcttttacccatcctgattgttacagtttgatagtttggatatgatttgtttgaccccttcaaatctcacactggaatttaatccccactgtggcagtgttggaggtggggcctagtggaaggtgtttgggtcacagggacagatccctcaggaagaactggtgccatccttgcagcaatgagtgagttctcaccttattagttccctctagagctggttgttaaaaacagcctggcacccaccctctacccccactctgtctggcttcatctcttaccatgaaatctctgcacatgctccccttcaccctccaccgtgagtggaaggaagcagcctggggctttcaccagacacccagtcttccaatcagcaggatcatgagccaaataaaccttttttctttagaaatttcctggtttcaggtattcctgtgtagcaacacaaacacactaagacactgatgaaacaccaaaagccattctccagatggatcactaatgaatcraagcacgacattaatagtgagaaaatgatagtataaaaaggactagtggtgagtatttaaatcaatcaaatacctaagtataaataaaagtaattgttgttaaaatgctttaaaacatattggaaaagtctaaataaaatatgggaaaagttgtataatacaaatggaatagttgtataataacagtctggatcaacatcaccagactggaataaaaaaaaaaaagtaaggaagtgagaatagggaagatgagcaggggaaggaaagttatgctagttgggctcaaggggagtaaaacgggatcatttaaaaaacaaaggttaaatatggtaatctgacaagcttaaaaggcaactgtttgtaccatttaaaatagaatttttctcttccaaaatccttcaaaagataaaatcaaacaaaatagagtttgtatgacaaagcacacaaaaaattgcaaagaagatggaaataataaaagtaagataacaagtaagtaagtaaagtaaaaaagtaaagccaagcataacagttatggcaataggtggaaacatgataaacttagataccaaaaggaaaacactctcagctttggtaacaaacagatccagtttacaaaaagacatacctaagaggtgatttagaaagtttagaaataaaagaataaatattaatatagtgtgaagacaataacagaaaaaccagtggtgatgtattaatataatacaaaggggagtttcaatcataatccttaaatgggccaggcgcggtggctcacgcctgtaatcccagctctttgggaggccaaggcgggtggatcacgaggtcagcagatcgagaccaccctagctaacatggtgaaaccccgtctctactaaaaatacaaaaaattagctgggcrtggtggcgggtgcctgtagtcccagctactcgggaggctgaggcaggagaatggcgtgaacctgggaggcagagcttgcagtgagccgagatggcgccactgcactccagcctgagcgacagagcgagactctgtctcaaaaaataaataaataaataaataaaaatccttaaatggggatcaaagaaatattttatattaatcaatggcaaaataaagatataataatcatgtaccttatgagccaaataataacattatattaaataaagaaaaatcaaggagaaatgaaaggagatgaaagacatacagtcgtagtaggaaaatgtgttttatatccatcagtttgacagattaaatagacaaaataatttgagatttaaataatataactttatgtgaatgaaacatattaattcttttattagaaatagagtttacatgaatggataaacaaaatgtggtatatacctgcaatgaaatgtttgtccttacaaagaaatgaaattctgacacatgctacaacatgaatgaaccttgaagacattgtgctaagtgaaataagcaagacacagaaggacaagaattatgattccactcatatgaggaacctagaatagatttatagagatagaaagtagatcagaggttcccaggggcttcaaggagtagaaaatgaggagttattgttttgtggatacagtgtttcaatttgggaaggtgaaaaagtgctggggaaggagagtggtgatggttgcacaaccgtgagaatttattatacttaatgccactgaactgtacacttaaaaattgttattgttttacgtatattttgccacaacaacaaaaaaggaaaagggccccaaaaatgaagctgacaacttttcatgattatttttgtaagtggtgatagtctacaatgcaaagaaaacaaaaaagcagaatatagccaggtcacatcctgtggccatatagcaataaaactgaattgtaagtaaatttaagcacaatygtaagaacaaaatctttgccagctggaaagtaaaagcaatgttctagatgactcttgggcttaaaataaaataaagacttagaaaccattgagaaattgttgaaaatacatgtgaacaatacttaataaaatatagaaaggatatactcaaagacttagtagcattagggaatttcagttgattaagaagtgttttttaaaaattacttgataaaaattaaatatttatttatttatttatttagtgagactgggtctcgctctgtgtcctaggctgaaatgcagtggcatgatcacagctcactgcagcctcgacttcctgtgctccagcaatcttcccacctcagtctcctgagtagctgggaccacagatgcaaaaccactacgcctagcttttttggtatatttttgtatttttttggtagagacaggttttcgccatgttgcccaggctagtctcaaactcccaagctcaagagatccacctactttggcctcccaaagtgctgggattacaggtgtgatgaatacacatttatattttaaaaacaaatactcttggtaaactaagaatgtaaatatgttttcgtgacctaataaagcctcctttaaaacagtggacatcttattgtacaatcgggtctagtagttttcccttaaaaatcaagaataagaaaagatttcaaccaccacttcttatttaacgttgttctagaagtactcaccaatattacaaaaaaaggaggtaaaaatagaagagccctcctaaagaaggagacaaaattaacatgatttgcaattaaaaatccaagaggatatacttaagagtcatttatttgatggaagcatttaatatgatgagcagacaaaaagtaaatacacaaataataactttcctgagtaccagcaatgaagggttataaaacattataggaaaagatacactcagaagagcaacagataatattaaatacctataaattatcttaaccagaaatatgtgtctttcagtaaaacaactacaaaactgtactaagaaaaaaattctttaatagacatgttcagaaatgggaaatggttacaccaactatcatgaggaaagaattctctccgaaatcatttgcagtctcaaagtgattctaaacaaaatcccaatagaactatttttggaacttaataaaattaatattagttcctctggaaaaatgaaaacagacaagaatatgtaagaaaatattggaaaagaaagaggaaacttgccctacagatgttaataattggaatagtgcggtaccagtgaaaagcctcaggccactggagcaaataaaatatcctgaaacacagtagtatttataagaaatgtatttataataaaacaataggaaatgaatgatttggaaaagtgagctctctgagaaaactgtcaaactacaacttaatattataccaaaataagtttcagaaaggtaaagatttagtgttaacgattaactcacctaaactaaagctagaaaaatatagttaaacacttaactgacccctggagaggaatgattgagagatttgaatacataggaatattaaaaattcagtgtattagaaaataaagcaaacaaatatcaaaagcaaatttgaaagcagatgtataacttagcacttggataataaataagaaaactttaacatcccgacaacaatagcaaaaaagggaacagacatcgcaggcaacacactaaggaaggaatgactaattagcccatgagaaaatgtttttcttttgtagattccctgggaaattgtaattcatcattatttaccatttaacatttctaagagttctttcaaaattagtatttgtgagagcattataaagaggaagattcatgaactaatggtaacatgatagatctggacaactgttgtgaagatagtttattagtatggatcaataatcataaatatttttctaactttaaccaagtaattaattcaacttttagaaatgcatactaaacaattgccacagatacacaaatataaggaacctatttaatttaatttctaaacatctcagcatgtatttgaataatgaaaagtctatttttaatatttgttaggttagcttacacttgtgtgtttaaaaagcatgttgatgcattttgttttttcccattcccatttaagtctcattccatttccttgtatttttgacgtcactagtgtcattttttgagtcctctaccaatttttcaagggtatatcatcttcagttccaattgaacatacagccctttttgaatctgtgtggcatgctatcttggggaattttactgcaagtcacaaatattgattcacatgatattagtagtgttgttatttacctttttcctggggggtgtatttttatctcaattatgaaaccacttcctgtatgagtttttataaagctctttaaactgcttgtttacagtgacatcaaatacttgaaattataagctcataccttccaagaataatttctaaatctgtataaaatttcttttaactacttttgtcaggtaaacctaaaaatatctaaaactagcattgattgaggtcatttaaagctgatatgacttcaccaaatgttactgttggttgaaaagagagtaattaaaaagttgtcttatggtacaaagggttttgttgaaaaaaaaggtaataactttctcttttatgagagataattttaaatttaaagaacaatgttgccatatattggaatatatatggtactcagacatggcacaaggatttatattcgagagtgttcggccaggcttggtggctcacgcctgtaaccccagcactttgggagggcgaggtgggcagatcacctgaggtcaggagctcgagatcagcctgaccaacatggagaaaccccatctgtactaaaaatacaaaattagctgggtgtgggggtgtgcacctgtaatcccagctactcaggaggctgaggcaggagaatcacttgaacccaggaggcagaggttgcagtgagctgagatcgcgccactgcactccagcctgggtgacaggcaatgagagtgaaactccgtctcaaaaaaaaagtgttcattgaagcattattttaaaacagtaaaaaagtcaaatgtctaacaattaagggtactaaaattaattgttatacttccatcaaacaatatcatgtagtcattaaaattctccattaaaagaatatttaataatttagggaaatacttataaaataacaagtgaaaaacctcataaaattatagatcttgatgtgaagaaaatatgtatatatttgaatgtatagaaaagaaaaaactaaggaggaaaaaatcaaaattttttttgatttggggtgatttttattatcttctttctacttttttatctttttaaagttttttctcagtgaaaatatacacattctataataaaaaagagcatttatcttaaatataaataaaatactctacaaattattaattactagtattatcttaacccagtaaaggctctattgctcttactttctgtgttgaataaagtattatagtcactacttagaaactccatgttttatctatgactgatactgcttcattcagctactgagcaaacaggcacagtgtcctgttccccatttagatcagtggtctccaacctttctgacaccagggaccagttttatggaaggcaatttttccacggatgggagggtaggggatagttttaggaagacaagcacattacatttattatgcactttatttgtattattattacattgtattatataatgaaataatcctatagctcactgtgatgtataatcagtgggagccctgagctggttttctgtgattagatgctgccatctgggggtaaygagagacggtgacagatcatcaggcattagattctcataaggagtgtgcaacccagatcccacacatgcacggttcacaatggggtttgtgctcctatgagaatctaatggcaccactgatctgacaggaggtggagctcaagtggtaatgctcactcgcccgtggctcacctcctgctgtgcagccaagtttttaacctgaactagatagatgagttttgagtagattaaaaaaggaagtaggggtaggggaggctgggcagaaataaacctgaggcctgggccctgtagcactcctgtatattactgactccattttggcctattctcacaccacacggtgctttttttcactggtctgttcgcagtcttttttcgtggaccacaacagtcgagctaccactttcattgacccccgaatccctcttcagaacggtcgtcttcccaatcatctaactcaccgacagcacctccagaggctccgaagttacagcgcyggagaggtaaccctccctacaccccgccctactgttcaccggtcacagtctctgcctcttccatgggagcagaacagttcttcagtggctaggatctagggttgcctgygctggaagagattaagccatatgcaccctgctttgtagaagaatgatgaccgggacacccacttaacaccccagagctgtcttcagttaccttttctgccttgccttttgtcccacacaatcaccactactaaaaacctgtctagttgaaaggaaactgaaaatgcactgtcaggagatccctacacttatggctggagctgtgcctcctgaggcctgtcatgtgtgaatacatggaactgccatggtatgtctgactaactttaaacttctacctctccaaaacatcctagaaaatacttcaataatgtatccatggactagaaactagggggaattaaccaggccacaggaagtggtgctctattcccactctattcgcgctctacaatgtgctctttccttggcagcactttgtggctaccatgaaaggctaaggatcacttcattgcctttctgaattagtatctatatcccatactcttcctgcccttctttctcgagccaaaactcaaaacatagctctttttttgctcctgatcagttcctgacaatatcatgagcaaatttctttttatgtcctaattgacatttcccaagtatctgtgccttctttttgtggaaaccaccaggacctcaagagatgtggcttctgagaactacttcccataaaacagcttttagaattggattatcataaggttaaaaaatcaaaaatatggagtaggaaggaaaggaatatatgtgtatgtaggtgagtgagtttgtgtgtgtgtgcgtgtgtgtgtgtgtacatatgtgtgtgtgtgtgtatatatatacacacacatatatacgcatatatatatatacacacacacacacatatatacgcatatatatatatatatacacacacacacatatgccacagtgagtcattccagggagagccagggagtttctctccagagaaactgggaagataacaattcaccctgcagccacctcctccagatagcaaacataagtctcaagggaagagcctattgttgatgtatcggcaccagttatttaccactttttcagaaggagtcctgtgtatactctgagaaacataactatttccaaccagtggcactcatggcttaatgccagtgtgataaaatgaatgttttttcatggagtcgtcttaagtatcattgtttcaggagactgctgaaagcatgctaaatctttctttcttcatatatataaggtgtatgtgactaggcagagagggagtactacacatccctgagcattacatgggtgtcaggatttgctagatgcagacgtgttcacagactacagaaagcaatgccccagcttcccagttcaacatgcgtagtctccctccctggtggcattcctgtaacacttcacaaagtacaaggtgggttgtcttgagattatagggaataaattcaaaattcttcatgaagttgaatatgcctttaaaaagttcaagctctttaatctcattaagacaatttcagtatccacatagggtaactacatgtgataaagtagctgagtactgcagacagattcactgtcaataaaacaaaaacttcagttgtgcaagattaagtccctaaaatacagatctcttacaattacaagaaattagtctgaaatgtaaatatttaaaacctttctaactgaaagaacaagactgaaaccatggacaccacttgcattacctgttttaaaacatgtgtttcatgtgattgaatagcccaaatagagttaatttaatatcmtttaaatcattaatatcatttgccataacatgtatggcaaagtgccatctgtatcagttaagaactagctggggccaggtgtgatggctcacacctgtaatcccagcactttaggaggtcgaggcaggcagatcacgaggtcaggagatcaagaccatcctggctaacatggtgaaaccccatctctactaaaataatacaaaaaattagtcaggcatggtggcgggtgcctgtagtcccagctactcgggaggctgaggcgtgaacccgggaggcagagcttgcagtgagccgagatggcaccactgcactccagcctgagcgacacagcgagactccmtctcaaaaaaaaaaaaaaaaaaagaactagctggaagactctaacacatatgatgaaagggcgttgctgtgtaccagccatctgtctgcttcctaatgcatccaccctgactgttcgtcacatttccaaacctcacccatccctatgcccatcctctctcttctggtagcttttggctgacagaagaggacaccaagaaaagcaacggagagagaagccaagaggcagagagtatctgatccagaggcagtgcaccagagaaaacaaagactcggcctctaagaaaataaatatgtggttcctcccactgcaagagccctcagcctagggataaggagacagagggactctggtatcaaaatagaggggagtgggtggtaggaaatgttgactgcatttgctgtgatgtgattttgctcagcaaaaattgattccatgcatggcttgctatgagcactgtggaatgcaaaatatgagacaatccctgccttagagaagtttgtattccacttttgaagccaggccaaaaatacatacagagttaagtaacgagagaaatcagaatatggttgagtggcaagagagatgttaggataagtgccacaaaagttcaaaagaagccaaggaaaagtatcttttaaaataaggtgcctggccaggcacagtgactcatgcctgtaatgaaaacactttgggaagctgagatgggagcatcacttgagcctaggagtttgcaaccagtctgggcagcatggcaggaccttttctctacaaaaatttaaaaattagtcagatgtggtggcgtgcacctgtgctcccagcttctcgggaggctgaagtgggaggatggcttgagcctgggaggtagaggctgaagctaaatgtgttcacaccactgcactccagcctaggcaacagtgcaagactctgtctcaacaaaacaaaacaaataataaaataaaataaagtacctgactagaacttgaaaactggtagaataggtacaaaggatggggaagggaagccttacagagcacagcctaagcaaaggtgcagaggtcggattgagaaaggctcacagagagacagtgactagttcggtctgagccaagcarcaggttcccgcttgctgtgccttggttttcagaaaactttagtgctgcatggaagagttggaacttttttaagggaccactgaatgaatttgaggaaagtaattgattcatccattgtttcagggtgaagtcatctctaaaacacatttgagagatggggaaagactcttggcatttggggcaggacaattctctgatgtgtggaatcatcccattaccttgcaggactttttttcctgaccccatccattaaatgtcaggagtgcccccagttccccaagtcattatgacaaaacaaaacagaacagccccccagcatttccacacacccatagatggtagcattaccccagtgaagaaccattattttacagtccagtaaactgaaataccaagagctcacttcacatagggagttcaggaccacagctcaggtttcctaacagtcatccatgcaaactctttttttttttttttttttgagctagagtctcgctctgtcacccaggctggagtgcagtggtgcgatctcggctcactgcaacctctgcctcctgggttcaagcgattctcctgcctcagcctcccaagtagttgggattacaggcgtgcaccaccacacctgtttaatttttgtattttcagtagagacggggtttcaccatgctggccagactggtctcgaactcttgacctcaagtgatctgcctgcctcggcctcccaaagtgctgggattacagacgtgagccaccacgcccagccacaaacttatatttttaaaagaagacaatgaaagccaagaagaggaagggctgtggcaaagagctattcgagagaggcctgctagagaccactgccacaatcagatggaaggggatgaggccgagttgaggtgacaaagagaaaacaaagggcagcccatagggagaaggctcaaggaagtcaggggttgtggaggaaaaagtcactgggacttcagtctgcagacaggcgttccagctccggcatgtccacagaggagctgagtatcaatcattgttcattcctcccctgccagggaccccagcttcctctgcaaatgggtgaccactaacgtgtgttccagctgtgtgattctcagagtctgtggggcttgattccacgtcttcaggaccgcataactaagagacccattaactacatagagctaagaggagcaggaaaggcaggacggaaggatggcaggtttgtctttaggcaagttgataatgtgtgtgaaaatagcagggtatctgattagatatgacagttaaacagatggaaatatgagactcagcaatcatcgatgggttatttccataatccattatttttctgtgtcccgtatcacaggcaatagggaattaactatagatatttcttagactacaacttacaagtgtgggtattttctgttcacctacataagccattctcttgagtgttattcagcagttgatttttttataaattgcatgtaaggacagaattaaaatgggtttctatattaaggatcctaaatggtaaaatgtttttcttcaaaccccaatggcagattattaatagaaacattgttaaaaatattttggattgtcctttacctcacctggaaaattttcagacagattcctgaaagcagttattacgaatataggatttatacataaaaagatcgttatttgacactttcacttgcattttaaggcggaggcacatctgtctgcaatatattcaagcaccagcaaagcaggccttatctctcctcagaatgtgtgaccagaataggtcacagataagtggagtgctatgaatactggatcccatcttagcaaggaaatcacgaaagggtaacacatttgccttgtttacactgcaattcctaatataagttgacatcaataaggaaggataagcagagcacataattttcatttcttttgccatcttatcttggtcaggttagaaaatcgttagtcatagaaaatttctggaaggtacacaccgaaaaaaaagcttgacagtgactgcctcaggaaagggcaagagtctgacagggaagagaagcttgcttctcactttagaagcagaagtcactcttagtcattctttgcagtgagcttctttgatggcagaagtcatttcatgggctctggtgacatgaaggaatcttcattcaggaagcttgcttttggggagagtaattgctgcattgcttcttaaaattggtcattttcctcttggctcaatgtaacctgcacttgatcacaggtttggctggaagtttgtaaaattcagacacctttgaaaataaactgtttaattacagtcatacatcacttaacagcagggatacattctgaaaatgttgttgttaggcaatcttgtcactgtggacatcctagagtgcgcttacacaaacctagatggtatagcctaccacacacctaggctgtacggtatggctatggctcccaggctgcaaacctgtacagcatattaactgtacagaatcctgtaggcagttgtaacacaatggtatttgtgcctctaaacatatctaaacatagaaaaggtaaagtaaaaatacaatataaaagatttaaaaaatagtacacctgtataggatacttacagtgaatggagcttgaaggacggaagtggctctgggtgagtcagtgagtgagtgactgtgaggcctaggacattactgtacactaatgtagaatataaacactgcacacttaggctacactaaattttttttattattatactttaagttctggggtacatgtttacaatgcgcaggtttgttacatttgtatacatgtgccatgtgggtttgctgcacccattaactcatcatttacattaggtatttctcctaatgctcttcctcccccagcccccaaccccactacaggcccctgtgtgtcatgttcccctccctgtgtccatgtgttctcattgttcaactcccacttatgagtgagaacatgaggtgtttgattttctcttcttgtgttactttgctgagaatgatggtttccagtttcatccatttcatccatgtccctgccaaggacacgaactcatcctttattatggctgcatagtattccatggtgtatatgtgccacattttctttatccagtctatcattgatgggcatttgggttggttcgatttttttttttttgagatggagtctcaccctgtctcccaggctggagtgcaatggcacggagtgcaatggcacgatcttggctcgctgcaaactcctcctcctgggttcaagtgattcttctgcctcagcctcctgagtagctgaggctacaggcacgcacccctacacccggctaattttttgtatctttagtagagacggggtttcaccgtgttggccaggctggtctcaaactcctgacctcatgatccacctgcctcggcctcccaaagtgctgggattacaggcgtgagccaccgtgcctggcctaattttatttttttaaagcaattacacctgacattgtgacagctatgacatgaccagtgataggactttttcagctctattataagcttatgggaacaccattgcctatgcatccattgttgactgaaacatcgctatgtggcacatcactgtatgaacaatatgtaatgaatgcagaatacagacacagatggaaaagcataattccccatctggagacacaggtacacataaaaataaagacattagattgtgttgtctatggttctatatcctagtgcctcgtagacagtttccacaccattaacatttttctatatttaatcacatggatctaccatcatttaacacaagcctttcttgaacatgatgtttattgcccgcttcttattataaaaatattgaacaactcaaatatctctcttttgtttccttaagataattctgacaactttgttaatgatctattttcagaacacagaaggaatctagagaggaatgtaaattcgtcctttgagcccttcctgtgaacttgctacatttttttttatcaagtctccagtgtttgcagagagagggttagctgattattaacccaaattcagtctaaaacatgcaattttcaatcacagctttaaggaaacccacaagtgtacattcccaaattgcaacattgaagagcagcttgtttaccagttgctgaaaactattttctgaggatatctattttgttttgtctggagagctaaatgtttgaagttttcacatttacaattatgatgaaagcgatcgatatcaaaagaaaaagaaatcctaaaagtagtccctactacaaactgggttttacccaattatggaagagttgttgcagcatgtctggggaaaggcaggccaccaagggctctctctcccctcgctcaccccttaccacatgtgcccacacacgcacgtacacccctgagaaacttaataagaccaaaggggtcaaatgccaggaaattagagtcatgtcattttggttttaaatggaaaatcagtcctgtagtcattttctgaccttaggaaaacaaagcaggccgcggatggtggctcacacctgtaatcccagcactttgggaggcagggcaggaggatctcttgaagccaggagttcaagaccagcctaggcaacatagcaagaacccatctctacaaaaacatttttaaaattagctgggcacagtgatgtgtgcctatagtccctgctattcaggaggctgaggcaggaagattgcttgggcccaggagtttgagcttgtagtgagctataattgcaccactacactccagcctggataacagagactgtctcaaaaaaaaaggaagagagagagagagagagaaagaaaaaagaaagaaagaaagccagccagccagccagccaggcagacagtcacagtggctaaagcctgtaatcccagcactttgggagaccgaggcaggcagatcacctgaagtcaggagttcaaaaccagcctggccaacatggcaaaaccccatctctactaaaaatagaaaaattaaccaggcatggtggtgcatgcctgtaatcccaactactcgggaggctaaggcatgagaatctcttgaacccgggaggcagaggttgcagtgagccaagatcgcgccactgcactccagcctaggcaacagggtgagactccatctcaaaaaagaaagaaagaggaaggaaggaaggaaggaaggaaggaaggaaggaaggaaggaaggaaggaaggaaggaaggaaggaaggaaatgaaagaaagagagagagagaaagaaagaaagagaaagaaagaaagaaagaaagaaagaaagaaagaaagaaagaaagaaagaaagagaaaraaagaaagaaaagaaaagaaagaaaaagaaagaaagccatgttggcatcatgtttgcagtgagattcaaatcagtcactcagttgctgtcagacgtccctcgggatggattgtttagtaccagtacagggcttcaaggatcctagcacatactaaatcctagttcaaacagaccctcggaatttcctccagccctgcctgaaactgtcttcatcgctgtccattcctgggccccttgttggagaagggcgtttccatccaatcctcctgttctccaggctctggtctttgagccatccagtaccaaccaaccgtttgcagacatttctgtggctcagggacgcagcaagccgtatctccccctgtgttatttcctctatcacactcatattaggcatgaagaatgtttgtcagtcagtcatctgcctttgggctaactggacttcagctggtttctgaagtttttcaatctggctcagctttacccgtgagtgggtgacctcagaagtaggcaccattaatgaatttcctgtgaaggccaggaatagaagtgagcctctttctgtttcaaagccttattcatttctgggtgatgccctgacagttagacactttcactcagggcgaaacaacaaatgtttcctgagtccagtgcacagccaagccttcccgagctcagccagcagatctggctgtttccccagtttccctctgtaatttatcacttagataaccttcagctggtgggtctctgagaatcctgtctttacaagatcaataatattttaaatacacgttaaggcaaactggcatgattccctccaagaaaaagagacttataatttcaatcccagaaagcctttacatatttatttatttatttattcatggagaaaaaagagaagtatgaggattcaatactgcatagtttattgatcagcaaacttttctttcatcttttgctttgtaaacatttgagactggaatgtgctgctgcagaaataccagcttctaaaccctggtgtctggctttgccagctgagcagagctgagatctaatgacatcaaagtgagaagtccaccaaagtggcacaaaatctactcccttgtccttcaagtaggccatgggcaataagaaggaccaggagagaaaacagatgcatctgcatctctacccaacttccagaaaagcagcaaagactaccacacacagagagtgaactggtggcccctgtctgcatacaaaggatgttatccttgggtgtggaatatggaagtgggaaccaaaggaaaatcagcaatgcctgtgtttgtcattagggatcgttaagtaatttgccctacattacgatctgcaatatcacacatggcctattcttaagtggccgtttggaactgacttgtctagactttgtagcactggtcctcatcaccttcctgaattctgtgtgagtgagttttatgctggtctcagagggagaaatgtctttccttttttttaaatctggatgtttgaactctttctaagtgtcttacaaaattatcatctgttacattaaattaaacttggcttgaggatgccttcatacttttgagtcattacgtaatggattgccacctcacttgggacatgaattaactgaaagcctaatttgggagtatactttggcaacaaagggttgagtctcagccaatcacaacagccaagcttcagtcagttgcaggtggctaactgatcagaccatgttcaaataaggcaaacactgagctgcttccgtaccatgctcccattccccaaccgtaaatgctgcctgcccatggttgcagaatggagctctctcctccctttctggttctggttctgagtgaggaccaccccattctcacaccattctttgatcaattaaactctgtaagtttactttgtctaaagtctttaacacttcaaaattcttaactattttaaagcctattttagcatactttgacaaatatcataggatgagttacactctacattaaatcccatatatctggtgaatgtactgcaatgtggaaaatctataatgcctctatagattttaacatcttactctgcaagggtcttaaaaaacaaaatgtatgtagaatcacagtgagaatgtccattatcatgctctagaactgcatagtttattgatcagcaaagttttctttcaccttttacaaaggtgattttttttaatttacaaaatttaaaattgagctaagttagtttttttgttttgttttgttttgtttttgagatagagtcttgctgtgtcgcccaggctggagtgcaatggtgcaatctcggttcactgcaacctatgcctcctgggttcaagggattctcgtgcctcagccttccgagtagctaggattacaggcatgcgccaccatgcctggcttatttttagatttttagtggaaatggggtttcaccctggtggccaatctcaaactcctatcctcaagtgatccacctgcctcagcctcccaaagtgctgggattacaggtgtgagccaccgcactggcaaaattgagctaatttagtttaaagttaatcatcacaagtatcaactttaggctaagcaagttatttatctctgaagttttgtcaaaatgcctaagctgaaccaagatattggaagcaggcaggcagtgtggaaggagtaaacaagtgctttgcagtcaagtattagaatcctggttatccccctgtcttacggttgtaaacctggggaaactttacttttcctggatcctcagattccctatttgtaaattttggttaataatgcttatcttgcagaatttgttaggatatataagatgctatgtgaacagaagccagcacagtgaatgcaataacaggcattcaagaaagaatgaatgtaatcaatactatttaaacaagaagtccattatacatttggtactaaagttcaatgctaccttggaaagttataggcgtaccttaccaatgatatttatctaggatttatctctctttaacaaatttatgatgagaaatgtttcttgggctattcagtgtattaatttgattaatattcatgactttgacatgatcacttctttttttttgaaacagagccttcctctgttgcccaggccagagtgatttcggctcacagcaacccctacctcccaggttcaagtgattcttctgcctcagcttcccaagtaggtgggatgacaggcatctgccaccacatctggctaagttttgtatttttagtagagatggggtttcactatgttggccaggctggtctcaaactcctgaccttgttatcaaggtctcagcctccccaagtgctaggattacaggcgtgagccagatggctttcttaaccatagtatagcacatcatcaactctacttagacacttttgtaagctttcttttccatcacttttttactttttcaacttaggtgacttcaaaatcttttaccccttaggttgaaaaactggtatcaagagacatctgaaattgatacaaatttctaatgcttatgcttttattctaaaattaggcctcagaagtttctagaaacagaggagcctctttactggccaggccaggacacagcttagtagctgctattcgaagccaacatcaacatgagtcattgccactgggtatgtatcatgcttgtttgagcccctggctcaaagaatagcaacacctagacttgattttttgtttgtttttctggtttttgtcatgaaccctttactattcaacattctgtctttcctttctcctcttttaggatatagtgcacaccccgacccctgctaccatccacccctctgtccttttcccctctcccttcctcctcacctatctgttcccctccctgtcttttctgttctttcccaaactctcaggtcctttcttccttattctattcagtgatttgttaatcccgtgcacaagagcaaggtttaaatgaggtgaattttactgtttttagacagtttttaatgtatacctctctttccatgtatgtatggcataaagtttgcagtgtccattcctaacttcagccacctctttccaaaacatatgccacttgtatcgaggaaaatgaaatgagagcatctaaatggtatttccattatcactactgggaaatcgacacatggattactttgcactcataaagaatcttttccataactacagcaaaatgaccaagaaaagttagaaggaagagaggagaactcctcttatgggagagctattttgttctcctttacctgttcatgcagagatgcattaatacccagtaaagatcctgaaacgttaaggacgattaacagagatctggttcacttttagtttgatcccttaaaaaattataatgttattatgtcatattttaaaaactctcaagagcttgcatttttttgatgagtatgctgcctgcccttcaaactccttcattaatcctggtatcaagcagccattttccaatcatcagagtgattatctctgggctgcagactcaaccacaactgtgcttttgtctgtttcagcatataatgacaagattgtggcatttcttcgccagccaaacatttttgaaatgctgcaagagcgtcagccaagcttagcaagaaaccacacactcaggtaagcctcgcccctcactccctggaactctaggtctttccagccatttttccyggtgggaaaacacctctgtggagacagagcggaagcttattatacattgtatttgtgcatttaaatgagaacttgaatcctcaagatgaagggttcggggttcctgtattctgggaaatggcataatcagagatggtcatattatcagattacatatcatttatatggtactgaaatgatttccattgatgtaggggggggaaggacagaaaggaaacaaaatagcttccattaaaaaattatttatgtacagcactgtataaattacttttagttttgaaatataattgttgaacggtaaaccaaatattgagcagccgtgttcgaaaataaaaaagcaaacaaaaagtttcttgtgtgttctaactacttacatcttatgcttcattagggtcatttttgaacaagtgccctgaaactctgaatcacatgtggaagggatagcgatctgaaatgataaaaagagaaaatattccctgaacttaaatcctgctttctcaccaaaatattcaaacatctttttccttcggtttactctccaacgttccaaaatctggagaggcatgggggttaagagtacatctctttgacgtttgaattttcactccaacaggtagggactattgatggaggcgtgttattcaactctctgcccttagtctcccaaatgggggtcacaaagtgggcatggttgcaatacttacttgaggatgtgtaaaggttaaggcagggcaggctagaatcccatcaacggctgcatttcattattccctgcccatgtggtgcagtcttgtgaatggggctgatacctgcaataccatactccgacttcctcggggaatcactgacagcttcaagtagtctctgcttttcaacccttgccactcccgccagaatggatcattcactattctttcccctccaacaccccctcattgacacctcttttccctgtattttcactctgtaaattagagccactaccctcccagctgtccctgatctcctctcctccctcttcttccacctccacacctaaacattcacctcctcatactctctcctccatcctcattttctcttctccctgccatggttcaagtttaggtgctcatcatctctcttctggaccatacaggggtttctcctaaaatattccctatcaccctatcataaccagagttacctacgtaaagcatagattaaatcatgacctccctacccttcaaaaaagctttcatggtttccatcacatatgaaataaagtcaagatttttttttttttttgagacagagtcttgctctgttgcctgggctgaagtgagatggtacaatctcagctcactgcaacatctgcctcccaggttcaagcaattcctgagcctcaacctgacaagtaactgggactacaggcatgtgccaccacacccagcaaaattttgctaatttttgtgcatttattagaggtggagtttcaccatgttggtcaggctggtctcaaactcctgacctcaagggatccacccatctcagcctcccaaagtactgggcttacaggtgttagccacctcacccagcctaaagtcaagatttctaagcataatgtccatggtctcaaagtctggccctaacctaactctccatcctgcactaagcttttccttccagggtattccacctccaccacacaggctgcgtactctcctgcctttgtctttccgggaatgacttccctattaaggacatctcatcccgttttaaaggctcagatcaaaagcaaaacttcagtgatctaggcaagctttagtatttctttttctttgagggggtgggaacttcctgatgttaccatggcatttgtttttttgtttgtttgtttttaattttttttattatacttctaagttctgggataaatgtgcagaaagtgcaggattgttacacaggtatacatgcaccatggtggtttgctgcacccatcaacccgtcatctacattaggtatttctcctaatgctatccctcccctagcccccattccccaacaggccccggtgtgtgatgttccgctccctgtgtccatgtgttctcgttgttcagttcccacttatgagtgagaacatgtagtgtttggttttctgttcttatgttagtttgctgagaatgatggtttcctagtatttcttttgtcttgctttgatagtatgctttttgtgcctcgaagatatttttagatctcttgtattctgtcatttacttgtgtctccctacagcactctaagctctttagagcaaggcctttctcttccttgtctttgtgcccactctgccccttacaacctggtcctctactttgaaaataggaaacaccaattacttttagagtgaatgaaagatctttagcatgaacaagtgatctttagcgtgatgaatggccactttcatttatgttcaactcttaagaattctctcccctggtttcattactgcactgctgcagaaggcagagtcatattcagccacctgggtcattcattcatgggctgctctttgactcacctaacaacccaagggaattttcaagggatttccagggatgttgtattatcttaagggtttttgacgcgtggttgttcttgaacattctttacgttactgattctaccattaagtagtgagttcactgcttgctttgtggaagaatttcaactcaccaaagacacaaaagtctcattttaatcattagaaaaggtttttttttaagtaattccctacataagtgagtggaatgtatttccaaaaggcagtagactgttttcatccctattatatatcacattacaacaatccaagaaactttaaatgttttgttgcaatatgggattgtacaattatgattttgcagagctgggggaacttgaaatcaggccacgttggaattggaaaaaaaacttggaaattatctagtatggaaactaataacctattttaaggttatggactcctttgagatgctgatggaagcacttatggactctcctccacatataaatataaacctctgaatataatttcaaatagttaatggaccctaaggaaactgtggacccaggttgagaacccaaatatttcatcaaaaacagaaggctcacgatgactatcagaaactggactatgtgatgatagaactaaaacagcagaaagcaaagagcaagaacttgttcttcaggaggtcaagcttaagagatgcaggaagccaggccctgctttccatgaggaggcatccacctgcccctgagtgccatgtcagggtgagtcagatccactttgaaggttcaggagttgaagagaataccactctcctcaggaccccacccagaagaactcatggcttcctctgtggtccccaagagcagatggtgacccctgttcagccattgctattctcagggagtcatggagtctctgtcttgggtctgcaaagccagttgctgggtttgagtatgtagaaaactgtccagttgacagcagtgacttgcggtgaaaagcaggaagccacatgtagagaaggggatggagccagaaaacccagaggttaatggcatctgttatcttcaaggggcatggaggtggtccttcaactagtgctttgattgtgtcactcatctgaatcaggattgtcccagggctatgtatgcagtagcaagcgaaacagacctgtaaattctcaatgaatttacaatctactgagggagacagataatagacaagcttggggtttgtttttttaagccatatacagctgcataatatgttaagtgccatgaagaacatgattagaattcagcaatagtrgataatatgctggtgcagaggaagaggacttacatcctaaacagaacacagggaaggcttttccaggtaggtgatgcttaagctgaaacctgaaggatgagaaggcattgtcccttgagatgcaaagtggagatcagggagagagtatgcaatggccctgaggcaggaaaagcttagatgtaggtgaaaaatgaaagaaagctagtgtggcccaggagtagattgggagggtaggtgagacctaccatggtgaagttggagagggaggccctatcaccaaccggaaacattttatttgaattgcgattctatttgagaagtgattgagaagttttcagctggaaagaaatatgattgcatctgtgtttttagtgaccacagatgcaatcatatttcatctgtttttcatgaccaccaatgaaatatgattgcagctgtggtcgttaaaaacacagatgcaatgtttaggcagctctgtggggaaaagataggctggggaggggcataagatggaacaggggctatgcaggagactattatattcatccatgatgatggtcgtgtggataatgggaaaatatggatgaagagaagggagcagtttggggtgatactgtggatgcaaaaacaacaggagctgatgacagcttgaacatggtgggtgaggagaagagagtaattaagaatgacagccaagtgtggggcttgtgcaggtgaatggataatggcatcatttactgagatgggaaagagtggaggaggaactggcttgaggagaggaagaatgtcaaggattttattttggatattgagttttgaggtctttgaagccacaagcggcttcaaatgtcaagatgtcaaggaggcagtcgcctgtcctgtcctgaactctagggaaagtgtgctctggagttctcccgatggtcaagggatatatgtaggagagacagctggcattcttgcccttagatggcttcctcagttctcagtgcactttgggatggagtcccaggggcatctggaggtcccttacaccactggctatgcatgacatgttgccagacatgacagaggatataatgtctggtggagagccaccaaaactctcagaaaatcgggcttagcattcagacacctggatgtggtccatatggtggtgccacgatagaaccactgtgctgggtggcactttctaaactggggactgcactttgctgccctagtggagatggccctctctgggcttctttttcccgcagggagggaggccagtggcttaaccagatgttgatcccttggggcaggaggataacctgcccaagggtacattatcattgggagagcatatagatttgaggtcattcataaggccaaaatcattaaattagagaagattcaagagcatcttccaaataacggggctgtgaggtggtgtcaggatttggaggagaaagcccagggctggggttraggacataggcagagggagaagaaggtgatgagagagatggggatgttctgttctctttgctgggctttcacatgttccctgctaaatgacatgtggacactgctgctccctttttcaacccagtcaaagaagccactgygaacaccccccaggttctggtgatgccatttcctgcaacggtgcttcacccgcactgaagttggatcagagtgcatttccctgtttaatcccattctgtctatctttgtagaggctcaaaatcttcccttgccttaaaaaaaaagatctccataccaaaaggtcaaattgactatattttttgcctgaaaatctctaagttatgatgaagatttggatttatattaatataatcaaagagaggaaaaagttgtacctgcagtattttggaaaatagattttttttttcattcatcttttgggccaggctcagtggctaaagcctgtaatcccagcactttgggaggctgaggcaggcgaatctcttgagcccaggagttcaagaccagcctgcgcaacatggtgaaaccctgtctctactaaaaatacaaaaattagccaagcctggtggtgtgcgtttgtagtcccagctacatggggggactgaggcaggaggatcactggagccttgggaggttggggcttcagtgagctgtgatcaggtcactgcactgcagagtgagcaacagagtgagaccctgtctcaaaaaaataaaaaattttttaaagaaaatacaaaaacctagctgagtgtggcggtgcatgcctataatcccagctactcaggaggctgaggcacaagaatcgtttgaacgcaggaggcagaggttgcagtgagctgagattttaccactgccctccagcctgggcaacagagcaagactctgtctcaaaaaaaaaagaaagaaagaaagaaagaaaacaaaagaaaagaaaatcatccatcttttaccactgggagaaactgagtgaggggtatacaggatctgtctgtttatttcttataattacacatgactctaaaattacctcaaagtgtaaaaattaaacaagaaaagaaaaaagttaaagattaaaaaaaaacatccttaattttccctatttctgctgcatctcttcaaaaaaggcaaaaaatattaactcctttgaagcatgcatacgatagaaagattcttggatatggtgtttgtaatatttgagtaacatcagggaagcaaattaaaaagttaatttgatccaaaaaaatcctacttatccatagacttacttgaaataatttgccgagttggagttggaggttgtctaaaaggatcagaatacacgagttgtagctgacagagacaaaattgatgcctgtgccttgactgacctgggagactgttcttggttcttggggccgggccccctctgtgcccaatgtggcatcataaattttccatcaggcacaagatttctcaagagacactcaccccgcaactcactctttcctcccatggcttccaacacgacatgagccaagaacagtctttttttttttttttgagatgaagtcttcctctgtcgcccaggctggagtgcagtggcacgatctcagttcactgcaacttccgcctcccggttcaagcgattctcctacctcagcatcctgaatagctgggattacaggcaggcaacaccacacctggctaatttttgtattgttagtagagacaaggtttcaccatattcctcaggctggtcttgaactcctgatctcgtgatctgcctgcctcagcctcccaaagtgctgggattacaagtgtgagccactgtgccccgccccagaacagtctttcaggagcaatctcttacccagctccactcctgactgtcttagctacctgaggacctaactttgctgtgttcctcagcttctgtacctgtgcaagtctrtagaaaagycatccctcatagagcatcctgagagcctgtgatacaaacttagaattctgcaaaatacataggacgttaggacattgctattcagcagtattggaagaggaaataagagatcagaagaaaatgtatttctgagtttatgtgttggcrtctaattttcctcttctttctcacatgattcagggagaaaatccattacattcggactgagggtaatcacgggcttgagaagttgtcctgtgatgcggatctggtcattttgctgaggtagggggctaggcctgaaatccttctggaaaagcttccctgggcagctctcctccatcacggccaccctgaaaatggcctagactgaaaaactcaccgcwtgttctagaggattctagtaactgcaacgcaagtgggaccccacccttgtacctgtgtccatcacagtccttagatttgcaattgagctagcaagagctgcgtaaagtacttgatggagactttgttgtaggattaatcaaggtttaaaacaacactgagaatttgcaagcagcatgtacctatctttctgtactacatttaaatctaattgcttttgttgctttgtgagaagtgtaagtgctgctaccccaattcgtgaacactttctcagggatgtaaaactgactttcttttctttcttttttttttttttttttttcatatgcagtctctttgaagaagagattatgtcctacgtccccctgcaggctgccttccaccctgggtatagcttctctccccgmtgttcaccctgttcttcacctcagaactccccaggtaacaggaatctggcctaatagctcctgttaagtggccacgtgtgtttcctccagtgaaggtgaatgaaaggcaactgtatgtgtgtgttctttctctcggccttcccaattccctaattgaaaatgcactctatcaggttttgacaaatggctgcctgttttttgtaatgccccccaagctagaatggggtttacagtttgaaatggttgggaaaaaaatgttttgctgggcaggtggctcatgcttataatcccagggctttgggaggccaagccagaaggatcacttgagtccaggagttcaagaccagcctgggcaacatagcgagctccccttctctacaaaaaaattaaaactaagccaagtgaggtagcatgtgcctgtagtcccagctactagggaggctgaagcaggagggttccttgagcccagcaggttgaggctgcagtgagctatgatttcaccactgccctcctgcccatacaacaaagagagtccctatctaaaaaaaaataaaaaagaaagaaagaaagaaaagaaaaaaattaagacagtattttatgacatgtgaaaactgtatgaaatttaaattgcagtgtccataaataaagtgtaattggacctcagccatgcctgttctatgctagctttcacaccagacttgagtaatagcaacagaaaccacatggtctgcaaagcctcaaatatttactctctggtcctttgcagaaaaaggttactgtccctgctctaaattgttgcattccaaagtcactctccgagcatttcaaacggaagagccctttctgaaacattctgccttgtgactctgaatcgattgcacaccacttttggtgatacagctactaggaaccattgttatatctccacaaagattccaaagaatttccttacacatttcaaaattattcctcctgttttctttatgtatgagaatgaacttgtggtacaaaaattctttgcaggtattttccattccaagtgagagaatacatatgttgaactgtttagtgaataaaagatattttcgccagacacaatggctaacccgcgtaatcccagcactttgggaagctgaggtgggcggatcacttgagcccaagagttcgagaccagcctgggccatatagtgagacctcatctctaccaaaaaaaattttttttaattagccaggtgtggtggtgcacgcctttagtatcagctattcaggaggctaaggcgggatctcttgaacccaggagacagaggttgcagtgaaccgagattgtgccactgcactccaagcactaggcaacagagcaagaccctgtctcaaaaaacaaacaaacgaaaaaaaagatattttctggattcatcaagataaagagcttaggtcaaatccatacctccagactggatccagatattggagaatttttccattcgtatttgacttgcattatcacattgttgtaggtttcatttaaagtaaaagagatcagtttgaaacatgtaggaacatcctatctcagaagctctagggccagggttggagcatggtttttgaagccagtggtaaaattcccaagagaaacagaacttggtaataagctttgtctctgagaagggatgtcgcactcagagttagtatcattcagtactgccgtaggtctccagactagagtatcttttagtctggttcctccaagttgtagcattcagaagtcyctcttagaggtagttgtgctcgtcgttaaaatatgttttcaagatagtatctccctgttgtcacttcctccaaacaagtgtaccaacagcattgttaaggaaatgtgcaatgcttgctacctctgacgcacaacataattaaatcccattgcctaaaaagaccaggagctttgctggagccgacatcaatacagtcacacacttttagcactcataggatgacctacttttggggagcgaagacaaaagtaaggggtttggggggaaaagtttggagaagctgtaggactgcatgatggtctgccatgttgtagagattgtcccagcctgataatgtgcctatgctttggtctacagactttgatamtagactatgatgttaacatcattatatgggagagatatcatattgcaaatagaaaaataagagtaaatgaagagttatttcctatatgagaattatttggatattctaaaaggaataaactttcctgatagagatatgactgatgccgtgaatctaagtaatcatccaattcattttgtcaaagtacttctttattctctagcattgaccacagggtcctagaatatgtaatccaaatacgttgattttaaactttacaatccccattctcttagactggtatgaaatctacccaggtgctacagagatggtgaatcatgaagtttatgccaaagtactctgtaaagcagaaattatttgaaaaatgcacagcagtcatcatggggacaggtgatagtaccagcggtagtgaaaatcataattaataaaatatactgaaatgtgctggacagaaaattatacttgcacttacagacctgtattctagttctgtgtacatcccaaaacctggtattccaccaagaccacttcttttcaagtggtggccattggttccctcaggcccaggtgtttggggcccaggtaggcggggccccaacgcttccttgcttttatcactcagccatatccctcccctccctttctcccagttactgtcatctaccaacctttttctcattctcaaggcctgtggcccctgccttgtagtcttcctctccttcccaagcaggtccttccgtcctcctggatgacttcaacatcgacagggaccctcattccgttccctggcttcccagtctctagactttgtctgcaatgactttctcctcccctgcctcaaccacttactcccaaaatcacattcctgaccttgtgatcatctccacaatcgctaattcaaacctcctcttctcttccaatgtgcttgatccactacccttcctactaccaccctttggcctcatcaaggcctctggttcacggacttttctcctttcctttctaacgtctttccctgatgcagcgtagattctgcggttcatcatttcaatagcacccttgccaatgccctgaactcccctggccctctccgttttgtttctaccctctggcagagcttcacccctagatgaaccttcctgtctgcttcccccacttctgcaatcaggcactcttgggtaaattcacctcacaaggcagattattaattctaaattagtcatctctcatctcacatgaaccttgaacacccaaaggaaaattctagcacattttttcgatctcctctactattatttcaaacatttcccctaaagcctccaaccctcagcacccttcctctctcctagcaaatgacgtcctgttttacctcactgagaagttgaagccatccagcagaaacttcttcaaaggcctgcccacaaggctagcaaacctgtacacatcttctctgtcatctctggaggtcacgaaaggaggtgtcctcactaaggtcgccatgaactctggccacccaatccagcgggcagttctcagccttcctaatctccggcagcgtgtaacatgaccaactgctgtcccccaacatcccctcttcagtttccttctgggacaccactccagacatctcatctacttccctggccattcccgcagcctcatcctccccttctatcatccttaagtctcaaacccaggcttttttctccactcaaactgtgtatctctccagacaaagggactatcatcaaagaccaagttcatgctcttcccccacaaatgtgttctttttctactcctccccgtctcagtgaatgtcaccgcagggtgttcagttacaaaatctgaaacccacctctcctccactacctgtatccaattcattgcctcttaaatacatctcctctctgcccacttcacttcatctccactgacgccagcctagtcccatttgagctctttgaatcccccttggtcctctggggttttgttcttttctgcaggaagatgaatgtttttatgattcaagtgacatcatgccagccactatgcaagggcttcctactacacttagcataaaacaaaattgcttaacaatgtaccttgtcctgtttcatgcagctcctgcccacctctcaggccttgtttttgtaccactttggtccttggactctgtgctccagacaaactggagtaccgctttccattccgccacaggacctttgcacatgctgatcttccacctggaatgctcttcttctcccagctcatctcctctcttagttaaagcatagcttttcttgacccatgcaatctaatttgtgcctatttattctttagattgtccccagagaagccttcccagacttagccagcagattctgtgatctcaaagaactggttttctttccttcatggatagcaatcattgtaacttgtattatatactcatttctgagagtttaccagcatcagtcttctctaaattgtaagcttagtacctggaatatagtaagtaactaataaatggttattgaatgggcaagccttgattctgaccacctttaaaacttgggtaagaatgttaattttccatccttttttaaattaaaaggtatatatagtaaagtatttacaaagcactctaaatgagacaaaagttctcctctatgtagagttagtgaattattattattgtaaactttactcttatgatgcaaggtcatctaatataaactctaatctaatataaactcctaaatgctctgagcctttgtgtacaggtatgtttatttgagcatcaatatcaatacaggaacatgatggacacatgtactaaagtcctacttacctcattatagtttcaatcacttcttgtagcaacttacaagaaaagtttagtctagttcagcttatgttaattattttagattatgcaagtacaattaaagctgagaaaaatgctcatccatgtccttttaagagaaatacaacttgaaagaattagagaggaagacataaatatttattctcattagaactcataaatgaatgtagtatattatttttatactttagtatattatttctatttattataaaagtcactgagagagtgatggaaatgaagggcttgtgggagaagaaaaatatggagatgccagaatgtgcctctgttgagctcttgctccactgtcactttgtgtatttgttcttccacagaaattgatgacctcatgcctgtactcccagcactttgggaggcctaggtgggcggatcacttgaggtcaggagttccagaccagcctggccaatgtagtgaaagctcatctctactaaaaatacaaaaattaacaaaaattatctgggtgtggtagtgcatgcctgtaatcccagcactttgggaggccaaggcgggtgaatcacctgaagtcaggagtttgagaccagcctggtcaacatggtgaaaccccgtctgtactaaaaatacaaaaaaaatcagccaggtatggtggcacacacctatgatcccagctactcgggaggctgaagtagcagaatcgcttgaacccaggaggtggaagttgcggtaagccgagagcacaccactgcactccagcctgggcaacagagcgagactccttctcaaaaaagaaaaaaagaagaagaagaagaagaaagaaagtgatgacctctgtgtgcttctctctgcaggtttacagagagccagtgcaagagccccttccccctaccgaagagactttgaggccaagctccgcaatttctacagaaaactggaagccaaaggatttggtcagggtccggggaaaattaagtgagtgctccagtgcttggcactgaattcagacagtagatttttcaatccctttctcccctacacccttgtaatattgtttttgagactggctactctggtgtggtagtggttatggtctgaagcgggggaagaaggaagttgggaagctggaaggaaagaggaaaggacattaagaaattggaagggaagcaggaagagaaggtaagagagggaaagagaatgagaaagaacagaagattttagacaaaggcatgtcgaaaatcacagggtagacctttccagaaaacaagaaatcttgaactaaataaaaaatctcatatttcccttcacttattcttgggaaaaaaatttaactcattggtcaaatttaaattcttggtaactttgtaattgaagtctaagtaaaatgttgtttatattttcccttctgggtttattattttcatctcaaaaagctgaacccaaactcaggaatcttaagcaatatcctatgagttgatcaaaatgaattatcttaaaagtagttccatatgatggaatgcacgagaagtgtacacattttccttgtgctcctgatgttttgaaaagtgtgttcagataatccctcgatgaactgacggaacctgggtcctgctctttcctctctctttggagaggctggggagtgagaacctaaacctggactcacaactcacttagaaccctgtccagcatcctgacttcagggccactgctcaccaccccttctccttctcaggctcattattcgccgggatcatttgttggagggaaccttcaatcaggtgatggcctattcgcggaaagagctccarcgaaacaagctctacgtcacctttgttggagaggaggggtgaggcaccaggagttttatgcagacacctaagcaagggtgggccagagcctcagggtcaggggtgatttttctcaagaaggagcacagtagctgtcagtcttcaccccaatgcgattctgatcacattctcccaggaggtccttcttttcaggtattgccaagctttaaaaaatgccatgatcttcaaaaacctaagattattgacatgcacaagaggatatgccracaatacagtcccagggcactgaatctttcctttttaggtggtgtacccctctgagtatctaatttaaaaaactctttctcttaaagtgcatgtatacaacttcatgccaaacttttcatatcatttcagtgatttcatgggaaaccacctcaaccatgaagggcaagcccatgtaggaaggcgtatcaaaatgaacttggaagccttttcagtccacccacatacacatacacacacacacatgcatgcacacattcactgttgcaggaaattcttttatgtgtcccacaacaaaggccttgtattcaatgggccagctgtgtgttttagctcagaggtgttagatgatcaaaagaaaacactaaggaaagctgccataagagtttattcatggacatctggttaagaaacatctccaaaccaattactgcatcctcattttctacagcaaattgatgctgccattggcattcactccaaagagcagaggctgctctctgctttccccagcacccaactctgaaagggcacactagaatctgggtgcaaacaggtcyccccacctccgggcacagaatgagcttcctggacctctgctttctttgcagcctggactacagtggcccctcgcgggagttcttcttccttctgtctcaggagctcttcaacccttactatggactctttgagtactcggcaaatgatacttacacggtgcagatcagccccatgtccgcatttgtagaaaaccatcttgagtggtaagctctataatgttcactttcttgtatttgaaagttctcctctttcttagtcagaattcagcagcatttctcaaaggccactgtgtttagagcagtggccagatgttatgagggatgagagtgaatgacagagtccaagaaggaagaatctgttagtcttcacccagaacacaagatggatttaccaaggatgctgataatatagcaactgcaaattgatgtgagaaagaataattgcctactgagaagacgctaagatcagtagacataggtcatgaatgttgataattttactaaaatcatagggtcccagtggargcttcttggaggtatttatgggtttgaaattctttcaccttggaccagtggctttagcactgtggacactggcttcygcatcttactgtaaaatatggctattgggtcagatgatctctaagcattcttctgacttgaaaatccagtatgtctttggttcctgggtggtctgctgttgaggcattctattaccacttacctatatgtataagaagattggtatcastcaatgctgtgcagttttgtggtgcagatgtgggtattagaggtctccagaaagctgctgggacacctgggatgcaggcactttcctgctgcatcaccacatgcctgatttgaaaattaccgctgttctgactgcaggagctcctgctgttgagagggaaatgagtcctggagatggctaatgtgagttcttctgacatgacttatttatgctgctgttgaagggagccattggggtgacacctgggcctgctggccttagaacccaagttcctatagtttggctatagagcatcagtataacccacctgtgctaaggcttccagatattgcacatgccttctctccaaatgcactcccagccctgaagttcttgagatgaggtagagtgagtgagtacacatcgagggtttggcacaagatgaaacaaaacgtgccctttgttgccccagaacttgtgaataagtggatgatggagcagagcagacaagtcaccgtggacgggcccaagaatggaatctgcctctcactgagctcacattcaggcaggctccattctgatggtagagagtgctatgacctgtaacacaggaatatacacatacacagattatacctaatacaatccctcaactagctcttagtttgtgagcatgaaatttaagatggtgtcttagagatcatgaattggaatcagcaatcaacagagaaatattttcatcaaatatcttaccatataagactatgctggatagcatcaggaataccttcgctaatttaacaattataaattaagcacatagtatgttctgggaggatacaaacataaaatgagcaaggtctcatgcctcaaagagactagtgtgaggaacacatgagccaaccaacaattacaatacaatagcttaaatgctcacttatacgcacatatacatatgtgggcatatgtttgcctgagatacatagataagcctgagaattgtattcaatcacaagggaaaaatatcgcactctgtccaagttagggggtcagggagtggggagtggagtctgtgaatctttcaaaaagaggagacggtggcataggacaacagggacaagtaccacggtgggatgaatggaagctgacgtttgaagaaaaccttggtgtcaagcatgtttcagtgcagccacaaaataaggccacaggtgaaggcctgatgggaagcacagaagatactgtggcccacacttggctggactacctgttaaaagtggcctccgtcactttccacagtgaccatgccttgcctgctgccccgtccctgcaaccaacctggctttgtggccttctgctcatctatgcattgcaggactgaagaagctttatagatgtgtccgttacacttcatcacattaaggaaggaaattgtgtgatacagggattttgcaagaattaccaaagttctctggatggatccctgatgagggcttgacagtgcctgtcctcgaaatgcaggttaaccgctgtgtcctttgttagaggacttggccccgcactaagcatgctgagtttcatccactgatgttctcmctcatgtggagagtatttgtggtgcatcctggaaacgcaattgcaggtagctttctgagccgactagcaatctaaactgagcccacggtgatgagattttcttcaacgccactctttggatgctgctgacttgtgatgaaatgggcagggaacccttatgatttaaagctgcractctgaatgcctcagtcccgagagtcctcagcctggcatgcagaacaagccccttcacctccacggggtcagagatcagattgtatcatgaccctccatgtggaatcacacttttcttctcttatcagtggctccaaatttctgagcaagggaaactggttttctttgcacagagccacagctgactgaatgtaagccacctaggaagagtctcatttagatttcaacaggaagccctgatcagctttgggacatcttaacaaaaccatgatgctgcagttattccttttgtttattttttgttattttcttgtgccatgtggcaaatagtttaacaaacaaaacatgcaggtttcacctatcttgtgcccctgagtggctcgttaagctctttggccagcattttagcaaagggaagctaggagagcccagatytggtgatgtggctttgggtattttgcacaaaatgctggcagtgtgtgggtgctgtggcacctgcctgaagacctgtcgctgtcatttctgcagcccgcaggtccatgacactcaggaaaccagaatcctgagtcctcaaatctgatcgctcacgactggtaccactggctgcctcttaactgcccacagcgtgggcgtrgctgctgctgatctcgggtcggtgtcaggtgctccttccaccttctgagggagttcatcaggagattcatggaggctgtgaagaggatgacaatcatcagagcctgtgcatcactcataaggaaacggagaaaccaaaagattacaaggctttctatgggcacagccttgactttgtaaagcaggacattgtcccttgacacaggacaagccagggcaggatttggcctgcaggaaggacagaggtgccttaatggacacccacgccctgcccacctcccttcactctggaatcagagataagcataaccacagacccgaaataaacatggcaaaccaggtcagcttcaaaagttgttgttggttttttccaaaaatagaaattttattctctagtgaggcattatcagaaaatgctgtgaaattggtattcatattttataaaatttataaatgtgtaaaaygctgatgagctaaatggatctattttgtactgctgagcataattttatatgttatcataatcattaataaaaattagatgaatttaaaagtcagttgcttgtaggctagtgaaatagtgaaaggactagagttttcctttaactggaagaattattactgcttaacatacacacatttaataccgattggtttgctatggaggaataactgagaaaccaaatgcactgagtagagtttatatgaatgtttcaacacagctgctcttacatgattatatttttttaatgcctagcaaaaatccattataaggcttcaaaggattaaacatcactcaggattgacacggtactcagctgtggctggaggcagcaactttgcagtggtcaattttatctttttttgttgttgttattctgcttctttatccttcgctgaccttcttctgcgtcccatcctcttacacattttctgagttccctctaaaaaataagctctattggagcagagacacttttgtcttatttcactctagcacaacacctggcactttcaggtgttcagaacatctccccgaccactgggtgcataaatgagtattattccacaagtcctaccagtctcttccttctaccagggttaagattaataaagtgctccctcctgccatgtgcaattaattgctcaaatttcacacttttctgtattatctgtggttttaaagcccttgcaaagtcagtgataaatgcacatgtcccttaagatctttacactctgggactctgctctccacgacgcgtgaatgctgcttgttactgaaggaaggcctcctccttcttctcacactgcacgtggtcctgcagcggccacttccaggcaaggcactgcccaaagacatcaatggagaaacccctgacagtgtgtccttcctctgaaagctcccctttgagagtgggtacttgacattctgggcttcctgctccctgtgtgtgggctttgtatccattggaatagagccagcttaatcaaaagccctagcagggcatcatgattccacccacttcctttctttctcgtgcagtgttgagacatacgaatatgaataaatatagtgaaaattctgtgttacacacgttaagtaagctggaaaaaaaaactgtttgtgggttttggtttttttttgttttttgcttttggtcaggatttttgatttttgttttgttttgttgcctttgacctaaagagactttctgcaattgctgtttcattacttatttgtacgactgacttccaaactgaaaggaccatgtcaaagtcagcagtgataatattcaggccaaagagaaagaggagttagagtcagaagagctctttcaaagctggagcctataagggaccacccatggacactgtggtcactcaaggacacagcccctgcgagacctggccacagcagggcaaagcagggaaataacactctcaatcaacactcttcttccaccctccagtcccaatggccaaacccaaccatgaaccagaggacagaggctctccagatactgcaacccacagtggccagtccctaagtcacagagcaggacagaaaaagatgggaaattagtggaggacaggagagcagggaatggaaaattaccacaagagcctctacatttcaggacattcaacccatccaccagaaatcttataatttacagaacagtatgtgtctgttgtgtctttgatgacagaagtcttggaatactattccaaatttcttttttcttttcttttcttttttttttttttgagatggaatttcgctcttgtcccccaggctgagtgcaatctttgctcactgcaacctccacctcctggttcaagcaagtctcctgcctcagcctcccaagtagctgggattacaggcacatgccaccacgcccagctaatttttgtatttttagtagagacggggtttcaccatgttggacaggctggtctcaaactcctgacctcaggtgatccatcctccttggcctcccaaagtgctgggattacaggcgtgagccaacgtgcccagcctattccacatttcatatcttcattctttgattatgatgatgtcatttgcatattgatgaggcactcatatgctacttttttatccttttcatatttattgtatcctgattttctatctttagggatacataatttaataattaagctaaataatgaaggatccattgagaacatgctaaatataccaggcactgtctaacaacattataacccagatataatgttattattacaacattataacccacatactgagttatcctacttttacagatgaggaaaatgaggtgcagacataaacaaagccacagagatagtcgaggaccaggtaggaataggaacccaggtatcatggctctatcatcaggatctagcccccattcaaaggcaaagtcagatatataattggtcaaattaaaatacaatgtgaccaatgctgtgcatacctctattatagtgcttatcacattgtattgtaataatgaggtacaaggaactttggaaaaatgaatgagaataattggctggcagagaagaggagtggggaattctagatggagggcccagcattcacagcagatgtcagtttggtgtggcctcagaagagagaaagaggctggaaaggcatcctggtgtcgggtagggaaaagcatttgatggcattcccaggcgtttgggttttgtcatgaagatgacaatgacagggagccaggcatttcattagtaaaggaagagcctgatcagatctttattaaactcagaaagtcaactctggttacaagtggaagatgaactggagtgggcaataggggtgtcatttaagaggctagtgaaatagttgtaggaagagatattaaagaatcaaaatagggcagaagcagtagaaatggaaagatttttcagaaggagcatgaacaaatgaatgaacaaaacttggtgatagattataaatggtgggaagttaagtatatgacaggctaaatagcttgaaatgacactggtgagcacctaaaattctaccaaatacttatcagtgcaaagacacctttttaaaaatcaacctaccattccttctttatgtagtaccctctattttaaatgatacttctttataatctgaattagccagattatagtagcacactcccagatgctgtgagatatgttatttcaacatttttaatatttaccaaaactttgtgtcattggaaactcttcacttacttgctgcaaaattatatataagaaactaccaagttaaaatgctcgcatattttgaatggaggcataaaaaacaaaactataaatgaattgtgaaaggtccaaatttatttttatgtctaatacaatgcatgaatattgcaaatgcatatagtttcaaactattatgtttatataggaaagattcacatttaagttcaaacattcccttctctaagggtctttcctgagcactcaatttaaaatagtgcatccatttataattttccaacttaacatcttactttaatatattgactgaatttatcactataaaaagtattaatatgtttataattcgttgtcgtttcttcccgaaaatgtaagcccagtgagaccagagtcttggctgtagctttcctagtcacatacttggcgctcagtaaatatgtgtggaaggaaggaaggaaaaaaagaaaggagggagggaagaagacaggctggacagatagacggatggttgagtggaaggatggatggacggatggaatacttctcaggtaaaacttcttggttaatgagaatttttatctcatttcaatttttagttcagaatatttaaactaaaataaaataaataaaaacagtaaaaataaataagtaaatttggagcctctcactcattgttgagtgtcatttaagctcctaccaactattctctctgaaatcaccactggaaattctttttgtcccaatcattctgaatgtcacttttcctggagcaaatctgagatgccctaaaagtctgaacaactgaaataggtgagttccttctctattcctaggaagaataccagcgcctcagacacattttctttgtcttaagtacagtcatgtgtcagttaacgacagggatacctctgagaaatgcatcactaagcaattttatcattgcgtgaacatcatagagtggaattacacaaacctagatggcagagcctacctcacacctatgctctatgctatagcctattgctcctgggcaacaaacctgcacaacatgttactgtactgaataccttaggcaactgtaacacaatagcaagtatttgtgtatctcaacatagctaaacatagaaaaagtacagtaaaattattgtatagaagataagaaatggtacacctgtatagggcagctccgttataatcttttgagaccgccgttgtatatgtggtctgtcattaactgaaatgtggttatgtggcctatgcttgtgctaacatgtatcattttaagaaacgactacgttatgagtcactctttacataattgtcagtgtgagaaggattttcagrgccagatttcagatktgatgctgttaatcagtttctctgcagccaccaaaatgtctgtgagctcatttatgtctgtggtggtgacgaatctaaccttacagttgtcacaatcagacattttaccacctctcaaaccaaaatttccaagaggatcccaaggccctttgctaactgcaaaataaacagactcccctgcccccttctgccccagccccgacctctctcccttcccaagcagatactacctgggtggtaaaaatcttctgttttcaggtctttagcaaggggaagtgggggaggagggaagctcttttgtgcatgtttagagtttggccaagtgggtaagtgggtattaagtgtaattgtagagttttatggaacttaagaagtcccggataacacattttaaatatcccttgctacatctgcagagtcttgaattagtaggtagaaaccacaacattatgagatcccactgggtgtctcatggcccttcaacctcccagggccctcctgacaaaagagctcagtgtggacttttgatctgagtttaagatcaggtaagccccagccccagccctacccctaacaacagcccctgggttctttcacgaacacctacaagagctttgctgaccccatctctggctgaatctcagtagcctccctatcaattctcaaagaagatgtggagcaaaagttagatgagaagtcaccatagaatgtacgggattggttgggattctgcctgtcctatttctgaacccagctttcttcagaatgtgtgagaaacttccagtaggaaaagaattaactatttagttaatgatgccagtactgtaactgggtatgcaaccaaaagaaaattatgttagattcctctctactttgaaaatacgtgaaaaaaaggaatgaaatttcttcaggaaaatctaggtgaatttatgcatatgctagaacataaaaattattgagaacataaaatgaactcaagaaaccttgagtggtagagacctttttagagacaatctttttaatcaacaactagaatctataaaagaaaagaaaggccgggcacagtggctcacacctctaattccaacactttaggaggccaaggcgggtggatcacttgaggtcaggagtttgagaccatcctggccaacatggtgaaaccccatctctactaaaaaatacaaaaattaaccaggcctagtggcacatgcctgtaatcccagctactcaggaggctgaggcaggagaattgcttgaacccaggtagcaaaggttgcagtgggcctggattgcgccactgcactccagcctgggcaacagagtgagacaccatctcaaaaaaaaaaaacgtatttgaatatataaaagttaaaatactttctgacaaaaataccataaacaaggtcaaaagacaagctttgatcttgaaaattaatctttgcaactcaagaaaatcagaggttgaaaatctgtaatacaaatttcaaagagctcttgcaacttgaaaaaaagaggagatacaaccctgggaaaactggyaaagaatatgaaaaagttggtcagagaagaacaaattcaaatgattgataaacccattaaaaaatgtcaacttttccagtggtgaaggaaatgaaaactaaggtaacaatgatatatcaccttataacgatcaaattgccaaaaattgaagagttatttatttttggaggggacataagtaaaaggatgctttcatgcattgttggtagaaacatgcatgaaagcaattttatagcctttcaggggggaatgcaatccacaatataaactaaaatttttaaaacccctataccctttagcccataaagttatctcatagaaacaaaagcactaatattcagtacttttgtaataacaggtaatatttattgagcccttattatgggccaggtatttttgcaaaggctcaacatgaattacataacctagtataatcctctattttacaaatgaggaaactcatacccatagaggtttaaacttgcccaatacaagagctagtaagtgacagaggtagggagcaatcacatgcagtctgactctagagtgcagactttttttttttttagacagagtcttgctctgtcaccaggctggagtgcaatggcacgatcttggctcactgcaacctccaccttcctggttcaagcgattctcctgcctcagcctcctgagtagctgggactacaggcgcccactatcacacccrgctaatttttgtatttttagtagagacggggtttcactattttggccaggctggtctcaaactcctgacttcatgattggcccgtctcggcctcccaaagtgctgggattacaggcgtgagccaccgcgcctggcctagtgcagacttttaaaagctatgctggactgccgcacaaaacacccaggtgtgtttatttcagcattgtttgtaaagacacaaacctagaagcaatgcaaatgtccatcggcaggggaatggttaaatrtattacagcagatccacactgcacagtcatatgaggcataaaaaagactgaattagaaccttaccaggtgatagagaaagatttcctcaagatattgttgagagaagaaaagcagaaaagcatgaaaaacgcaattcaaaaactgaaaaatagtaaccccaagcctgtgtgtatgtagctagagatatgtaaatataaatatattagtatgtgattatatgattcagataaaaaatatggaagggcacattttagattatcaatatktgtcacaggagatgagccgaggtaacaggagccagccatgccaggagaagccaaagtctatataaaaattacatctgtgggtaaaaaataaataaatctcttacagccaagatgccatttggtaaaaatgtcttagcttaattattagtggtaaacaaatgtcttagatatgcattcatcaatgcactattcttatcacctaaggacttgatgctgggttctacaaactgttctacacatgagctcctggcatattgtgaatgcctcatgtatatggtacaactatgctcaccctaccctgggtctcttcccttctttatctctttttccatttatcccccctttactcagcacagacctctttactaattccctactgtctacgaaatggagtctggactcctcggattctcaggacagccaaagcacgaggaccacctgccttgagacaccatctgcctctcccgggcagctcctcctctgccctccccacgcttccttaggctttgctctgctgcccatatgtgcgcgattgtttcttctgttcttcttctctcatttacatgggcgcaaatttcctaccctgaaaatccacttaaaatactgtgtagttcattcatgatttcttcatgatttcctgcaccttctcaagacaaatatgttcatcttctcttgaattatttttttattattattattctactttaaggttttttttaaaaaaaacacaaaggtttccaaacccttttagctggaaccttgttctccaatctagaacagacgaaagtgaagccttgcctctggcaaggaggggtgcctggtccactgagcccctcaggctcttcctcctccccatctctatgcttctgtgcaaaatagcttgagaaagcactgctctaatctactgtctgcgtctctccttccatccctccctggccactttgtgttagcttttaaactggatcagggcaacatcttattgttcaggtttgccctctgcagccagcgtggtttctggcatggaggcagcacccttcaggwcctgaggcaggtgccacacagcaaaaggcaaacccaggtttcatgcctgctccaactctcagtagaacctgggcagctttcttaacctatctgagtctcagcctcctagttcaccaaaasgacataagagtgcctgatgtggtttgacggatgcgtctctcagaattcatatgttgaaacttaatcaccaacgtgatgatattaagaggtggggcctttaagaagtgattaaacgatgagggcagagtcatgaatgggagtaaggcccttataaaaggccttgagagagtgagtttgcccactaggtacagtagcaccaccacgatcacccccagctgtcacraccaaaaatgtttccagacattgccacaattctcctaggaggcaaaatcactctgttgagaatcactgttttcatgatggaagactggaaaaagaaaaggttaagcaaaatttttgcaggattaaaagtatttctgtaggcctagagttttaggaaaacattttcagccttggaatacgtcatggctgcgggttgaatatatgtgtttttccaaaattcataggttgaaacttaacccccaaggtgatggtattaagaagtcagaccttggctgggcaaggaaagtcatgcctgtaatcccagcactttgggaggccaaggcgggtggatcacctgaagtcaggagttcaagaccagtctgacaacatggtgaaaccccatctctactaaaaatacaaaaattagccaggcgtggtggcacatgtctgtaatcccagctactcaggaaggctaaggcaggagaatcgcttgaacctgggaggcagaggttgcagtgagcctaattgcattgcactccagcctgagcaacaaaagcaaaactccatctcaaaaataaacaacaacagaaaaagaagtgaggcgtttgggaaagtgattaagtcatgagggctccacctttgtgaatgggatcagtccccctataaaagaggttgaagggagtggcctagtcccttttgctcttcccattctgccatttgaggataccgcaaggtgtccatcttagaagcagagaacaaggccttaccagaccctgaatcttttggcaccttgatcttggatttctcagccttcagagctgtgagaaataaatttctattatttataaattactcaagccatggtattttgttatagccacrggaatgaactaagacactcacatattagacytctctgattattggaccagcataactgaaccacacactttagttttcaaatgytggcaactgaagaacttactttaagtaatgaccttcaagtaatgaccaggtgagtctcggtgcagttagtccactgagttcatgtcctgattccctgctagtccatccagaagagaatctcccagatgctgttatcatttgcttcccaagacagttgcctcctggactgagtcagagggaaaagcttagatagaagccacacctctgtctccagccataagcgggctgctggaaggattcccacagagttgccatgggctcttcatgaaggctggaggttagctatggccctggcgtgctctcacctgccccacaacagccacctcaccctccaagcaggcctgcagctgcgcaggagttctagacaccatgcctcagtcctcccacaggccaagagggaaaaattacaaagcaaaccactggtggggatgccagggcctacaccaaaccccctattagctgtggagacaggagactagcctgtggccaaaccctgaactcagcccacaagaatgtgcacggagcacagggaatgacagcaatgctggccttggtataaaagccaggagcagggaaatttgattgtgccaggaggacagggagctgcagagaatcaaaactctgcttccctaatatttattccaaaaacagctccgtggtggggatgttattgctggcacttccgcctactctttgtactgtgtgttctctttccaaaggtagttctgcttgtttgtttgtttgtttgttttgagatggaatttcgctcttgtcccccaggctagagtgcaatggtgcgatcttggctcactgcaacctcctcctcccaggttcaagcaattctcctgcctcagcctctcaagtagctgggattacaggtgtgtgccaccaggcccggctaatttttgtgtttttagtacataaggggtttctccatgttggccggggggggtctcgaactcctgacctcagktgattcacctgcctcggcctcccaaagtgctgggattatagtcatgagccgccatgcctggccttgctcrtatttttaaacaccagcatcaaacagccctgaaaactgctctttctaggagcttggctttgtggggccgctagaaggatgcaaggcctttgaggagacaatgtcagaagagagagaaatcttgaattataagagagagcaaaaagtggatggaagaagagcccagaggaggcagggaaagacaatagatagcccaagtgaagacattagctttgaaagagagtcagccccagcaggagaattgcttgaacccgggaggtggaggttgcagtgagcagagatctcgccattgcactccagcctgagcaacaagagggaaacgccatctcgaaaaaaagaaaagagtcagcccctttttccttgagatcgagggaaataaatggcaagtgtagattgcagatgtacttactaatgagagaggcgccgaaagcaagaaccagagggagggagaggctggtgatatgagggggattagataaaaagaagacccccccaattagtggggtgtaaggaggcaaggatgcatgtgcctgcaggcggtggtgtgagaggaggccaagtggagccattcatactctcagcttctagaaaagcctctgtcctccatcccttcttccagtatccatgaggaaatgcaatgagtgatgcctaaggcaaaaaacttcacttttgaccttcagactatgtttttcatcttaaaaaaaaaagatgagggacttggaatgggtggttctcaaattttagtcggcaactgcagaatttattttaaatgcagatttccataacccaccccatagagtctgatctccaggtacctagatcttaacaaacaccccagggattcagataccaatggaagggtcaccaccacctttgagaaattttgccttagatgttagcagcgtcaagagtctttcaaagagtgtgagaaaaaaagctggctgttcatgcagttttcacactctgaaatgaaatctaccccaggmagacacaacaggttttcactagattttctaatatataagaagttagaaaatatgagaagaccaaacctgaaggcagtaacactgagtaaagcatggaaacatacattgtgtgggaacgtcatgaagtcttattacttaaataatgaggttgagaaaggataattatttttaattaaacaaagttagaaggataaggaaagaggggtatctttgagatgggtttttaaaaatgtaatagaacttagcaattatgaagtacttttcatcttcaaagaacctattaacattaaattactctttcttttcattctcctgtgaggtaagtaagcaaatactaacattattatcccttatttgtagatgggaagagaggagtggagaggctttgacatgcccatgcagagctaaaattgaaagaattcttttttcacaagttcctactagagactgtggagacccaggtttggggctattgtttcacctctagctctcccgtgtgcttgtaatatttggaaaagaagttactgcaaaattatgtaagcaagcattagtgggaggtggaaggagctcctgtgtcctgtagaggggcatgaaatgctatttacaagtctccaaatttccctggtatatcaggatttaaactgaggaggttttcacgagaatcagcgttaattaacttgagcagactctttacattatcttatttcagcatcctaatataaaatagggattaaaaattatgctttatttgttgattcaaaactcttttttatgaatgtattatggcatgattacacaaatgaacatcgatgctgcctaccttagaaatttgcttcaaggacaaaggaaagtaaagcactctagtaacaatatcaagcccaataatcggtcggaatatgtggtcagcatcatggctgagaaatttttaggcttgactctaagtatgaaaattaacaaaattggaactattatttaaattactgaaaatgtaatttccatgaaatcagttcatttcctgaatatttaaatgctaaatagaatggacagaatcaatatattgcattcaaaagtctttttgtctgttgggagaggtttaaaaagcaaattatatgaaagtataaagacgtctttctgttcagcccagtttcatgagaggagggatacattcagcggggtggagggtaaagagtttgacaacaacagaaactggaatgacaggaggggtgggcccattgtaaaccacctagcatcagttattctcaattaaaaatagcgcagctgaaaaaagtactgcaaatggcattagcagaggtggaccagggacagaggtacaatcctaatcaaattgagaacagaaccaaggtagctcagtgatctcaggatcggagaagggggatgttggtggagatgtataaaactaatgatcaggaatatcattgtgaacgataaatgggaatcactatagacctctagggaagtgtgtgatgtaatccaggaaatggatcctccagcctaggctgagagcagatcagccttgggacctttaggggtacagaggagaggrgaggcttcctactttcagatgatgaatagaaaacaaaggctacactggctgtccctactatccagacttctagggactttctctttatagtctaattttaaagagtatcaataaattctattatctaaagaaaaatatcatcagtaggtaaatcttcaaaacaataaagcatcatagaacatagtcacaagcctcaatattatactgatttagtattttatttggcttatgcattccatattttccctctatctatgcaattaattcagaaccaattacttaaatagcttcaggtatttctggtatcctgattgtatcagtacatagatcttgtgtggcatggcaacttgatgttgtcagagccattattattttgccattcatgtgaaaattacagaatgctacatcagtttagacttaggtcatatttaaataattctaacatcttcctgaagcataatgtccctagattgtacactccatgggagcatgagggccttgtctattatgttcactaagtattccagcagttagcacagtgccttgcagatgatagataacttatgattcatagaaagattgaatgaatgaatggagtggaaattctaaacattgtttggtttagcccaagttgattttttttaacctgactcagatttatggaaatattgtgcattggttaatgcatcacaggtaagaaagagataataacatttaaagggtcaataaggcactctgggttctgcccggaacacaatggcattgccattcctgtattctctggtctgtgcagctcaaataattaagrcttctaaaccttcaccttcctgtattatccagttagatgaagatatagcagggccaggtgcagtggctcacgcctgtratcccaacactttgggaggccaaggcaggaagattgcttgagtccaggagtttgagactaccctgggcaacatagcaagacctgtctctacaaaaaataaattagccaggcatggtggtgtgcaactgtggtccctgctactcggragactaaggcgagaggatcacttaacccaggaggtcaaagctgcagtgagccgagatcgcatcactgcattcagcctgggcaacagagtgagactctgtctcaaaaaaagaaaaaatttttgaggctatagcaggtttcagagcactttagttatccaggcaagcagccttttatggtcaaattttctatataattctgggcttggaactagacactgtatctcattctaaaactagataaattcccttcttgygtgaaattaaatatattactttagtggaacacttacaaattccaagatcctatgctgagtgaaaggtgttctggacaagcaaggaggagggctatgctgcgggtgggcactccctcactttcctaaggctgccatagcaaattaccacaaactggccattctcagttctggaagccagaaggccaaaatcaaggtgtcagcaaggccacactccctctgaaggctccaggggagaccctttttttacctctttcagcttctgggatttcaacggctccttggcttgtggctgcatcactccagtctctgcctctgtctcacatggccttctcatcggttcctgtgtcctctcctctctatctcttataagaacgcttgtcgatggattagggcccacctggataatccaagatcatcttatcttgaggtcctttacttaattatatcttcaaagactccttctccaaataacatcacgttcacaggttccagggtttaggatatgggcatatcttgtgggagccaatattcaacccattcagatacctcccatcatggaaaccaccaagtttaataatgcagtattatgtttcactctgaacctttggagtgtctgtttctaaagaatacaccagattttgatagaaaattcaccaatctttccaaaagcccccaaaggcctctgagaagaaattggtagtattctcccaaggtaaacagagaaaccagtgaaaaaaatttcaactgtttgcctgagctcataaagcaaattcacaaaaaagtcaacctggagaactaatgactgaggctcagacaacggtaaaatagctagaaagttaaataactaaaaactgagctattagctaacgttaatagctaaactgagagctaagctattttggtccattaattaactactttgattaattttgtagagtgaattgttcagtcgtttgaccatgaaaggctgcttgcctggataactaaatgcacatcgtttttgcgacttgtagacataatctcagtcatgagcatccatgatatcgcaaaacaaaatatttcaactctcccagtaaagaatatttggaagctaaggagaaatcatgctttagaggtcaatgaaagcatctttgagggccagagtggtaacatacctggacacatctagatacgggaggaaatcaaaggtggggtaatgttctctatatttatgggaaggtttattttcctggatctttgttccttaactcctttccacattaacctaatttaatccttataatctgggaaaatgtgattgatacattcagtattaacacaagctaaccagaatgatgggtcaaaaaatatcacactttcraatgatcagttttaccacaactggtttttcattgaattgaagagcaatactaagtatgttatttgccatctctatatggtcagagggtttgttaagagtctgcataaggtacttttagaagtgctttctctaaaagagaggcacaccgcacacttggcccaccacgttgaggggaagcagctctggtctcactcctctgcccccctgcagggcagatattaatggaggggacttggcggcaccagggctagacattcatttcagttgctaattagcaatccgaagataatatcctgtcattatcctgtgttggcagagtctctttcatggcagatgaagaaaacttcaagttttctcagctaatttgtaaaatcatttccacataaagggaagctatgaaaaccaaatataaatcatgacttgcatctgcaatatttaaacaatttttatggggcattggggaggagattctttacacattccccaaaacagtatctgaataaaggtgggtgtagagaatagaccaaacctacctaacccccgtggcagtgacctacattccactccagccacctgctcccacagtggccctctcaacctcattatcacccagaactgtgccatgtcagaaactgaaaactctaaaatcctactgtcaatcattctacagccggcgttcccacctcctccccctaccatcgctccttgccaagctcgttctcaccttggattctctgtctcctcatagtctggcatggcctccttcatcccaggcctcctgagcgccttcattccctgcacacccaattccctccctgctccatgcttgcaccccatctgaaggacaaaacgccactgtggattagtattgtaactcactcttccccattccatgccagggtagttttctatagctctagccctggagaaaatgaaataattccaagaaagggtacaattctaaatcacactccctgacctcagaaagtgccacagcaaagctcaccagtcctgttacaggggcatcttccatttgactgtcccaaaagcctccatcaaccaaaatcacgtccactgtgagatgacttcagaccctactgaaatggaaacactgaggtgaccacttcaatttctcaccccaaataaaaatgctacccaaccttaacaccctcgctggagtccattcctccactcaagttggacctgcccactcaggctctaggcccaccagtccccatctccatgcctctccagcagtcatccctttctcatggatctttacacttcatgctctccccctgctctgctcctctccctcactcacttcctcacctactgaagtctgatttcagtaatcgtcaccagcactgccctttccatgagcagcagagaccatctaatcaacagagccagtgaactcttaccactttttactttttttatttttatttattttttttttgagacagagtttcgctctgtcacccatgctggagtgcagtggtgcaatctcggctcactgcaacctccgcctcccaggttcaagcgattctcccacctcagcctctcaagtagctgggattacaggcctgtgccaccatgcttggctaatttttttttttttttttttttagtagagatggggtttcaccacattggccaggctggtttcaaactcctgacctcaggtgatccacccacctcagccttccaaagcgctgggattacaggcatgagccaccatgcctggctcatgctttactgtaatcgacactttactgcagtagatacaaactcctatttgaaactctaccatcttagattctgacatgccattgtcacctagtttttattatatctttattataagtaaataaacatagttttatcacatcagtaaggtatactcattatgaaaaaatttaatatacataagaaaatatctccatacagaaataaatgccattattcttctgacctaagtttttccatatcttttatggatggatggatggatggatggatggaaagacagatataattttatataaaatatagcaatgtaatcaaagtttactgctttataaacttctctccatactaacatatgaattctaaatttatattttcagctctgacctctctattgagcttcaaactttattatcaaaatacctactagacatctccactttgatcctcctccaagttaataattaatctctcccaccaagccacttcttcctgtcatccttctcttctgctgctgctcactgtcctgctgatttacctccaaattgttcggcatgatgcccttgacatattgtaataacctccaaatctgccccctcctaaaatctatatccttcatatgggtgcaaagtgatttctctaaaaatgccaaaacaagcatgtcactcccctgtttaaacctgtcaatgggttctcatcgtctacagtttaaagggtgaacttgttggcatggaaaataagaccttccaggacctcctgctatctctctccacaaccttatctcacatcttgtccttcctcattctgtatgctctagtaatcatgaattgcacgctgttctaaacacataccattatctttcctgactcttttccgatgtgattttattttcttggaaagcctttccctgtcctcttaagcaaactaatttctattcattcttccaggctaattcttaggcttacctcacttgtcacctccttcaggaggcctgcctggatttaaccccgccagagccaagctatgcttcctccccggagttttcacagcaccctgtgcacttctcttcaccacttgctcygtggtgatgagatactgcattgctgtgtctatctcccttcckagcttgtaaactcaaaatgaatgagtaccttaggatcttcctatgcacctggcacatagtaggcacttgataagtttgttgaaattggaaacgtatgaacacactgcaatttccctcacattgaaaaaacaacaacccaaacctycatgtcatgccctcctccactgaccactccactgctcccctttagaggtgcattcctagaaagagttatctgtgctggctttctccactgcctctcctcccattctctccagccagcttcctcccctgcacccctaatgaagattgccaaarccatctggtgacctctcagactgcttactacctgatctcagaggcatttgacacagtcggcctctgcctccttcctgcaccatgcgctccacatccctgttcctccagcctcgccacctgttctttctcatgtactttattgttgcctctcatcttccagatccccgaatgctgcatcaattaacattcagccctgggtccgcctctccatctgcacaaacttcctccatgatcttgtccagatgcctggcttcaaatgccatctgcatcctgacggccccacagtgacatctgtagtgcggccctgtgcccggaggtactgactcctaagtacaactgcctgctccacagctccactcagatataaataggcagcacaaaygtaatatgtctgaaagagaactctccatttcctcctccaagccctgttctggtgtttcccatctcagtaaatggcacccggttgctctggcccaaggccgtggactgttcctggtgcctctctttttctcatctctccccttaaatgcatcagtaaattcccttggctgtatcttgagaatacatccagactctgacctcctcacctccactaccacccccagtataagccaccatcacctcccatctggatgcagaagcctccagacaggcctctgccttcactcttgccagactcacctctctccatgcatcatccagagtgatcattttaacacatcggttcattccaaagaccctacacgaaacttccaatggattcccatcatacttagaatgaaatctaaagtccttcccatggcctgccaagtccggcatgatctatcccctgggtgcctctccaaactcatgttctgccatttcccccttctctctctggagtccacccccactggcctctttgcattgctcaagcaaaccacacaccttcccaccttagatcccctaagctgtcccccagcttgtgatgctcattctccaggagctcactctttttctttactcaggtcctgcatcatcccctcagcaatgttgacactccctggyrcattcagaaggaattattctcccccmtcatcacttccccaaaagaaacctggagcccaaattattggtgggagtttaagatgatatttggtggggtaggaagtacacttacagattcagagaatgatgaaaagctgctcaaatgtgcagagtggagcacaaagccttaggggtaagacctgcattgcctcagagggcccagtcagccttcttcaagttttcaagaaaggcaagttagaaaggagtatatcatcacctgtttagatatattttcccacaccctgtgctctattccagtggttctcaagagaggttgattttgcaccatcactctccaccgccagtggacactggcaatgtcaggaggtagtttgggttgtcccagcttgggaggctggtactactgggcatctagtaggyaggagtcagagatgctgttaaacatcctataatacaccagaaagcaaacatcaacagtgctgaggctgaggaaccaactctattcttttgagaactgcaaaagactccttaaaggaacttaacccatgcaagtcctggtccattaccagggaagcagtgtctgggaaagatccaggaagtatcagagatagaaaacatgactgctacagaaagaatcttctagaactcagctgacacaaaccacctggctgtcaacctacaggtggtaggcaatgcataggtgaatgcagtccccagagtcatggcttgggaaacaggacattacaatsgtgtcctggaggcatccaggcatggatgcagttatagcaaccctctggcctcattcactgacccaacaaaatgtgtgaacccccaaaatttgccagtacagtgcttgtttcgacagacgtttgtgctccagaagatgccatagtggttagaagaggcctttatagactaacgactgcgtgcagggtttttaacagacctcagtgtcctgccacatgttcctgcatctgcctcagcccccacctcctcaccaaaggcacaagagccaagcacattatcaccaaatgcccagcctctttacagtgcccagtacaccatgtgatcagctctccaggcaggaagacccagctttgggtctcccaagtctgaagcttatcagggagtatttttcatgctgagctgtgatgcatcaaaagatgcagaagccaagaattaagcagaaggagatgagtagcctgatctgttggggcaacagatcaagaagaagagactaagaaggtcacccaaagcaggagaccccttgaatcaatccttagcagcccaagtttaatgccgggaaatcaaactgccagaaatgccctacagagccttttcagacttggcatattgcctgggtgctgcactgagggtttcgctcaatttttatatcactttcgtataaaaggattaactagaaggcttttaaagtcttttctttcactatccaaaatgtccttccagagtatcattaggtcttttattttcttggcttggcaaactatcccgcttccccttccataaatcgtggcctgtaaataagagattcctcttgcagacttcccaactgcatttttttgtcattacaaaaactgctttcgtttaaataatctgttgaaaaatacactgaaatcattacatactaattcctgctaaaacatgttccccaacagtagttcactagagaaactgaagagggagagaaggaagggagagggagacctgctatttcagccccttgatgtaaaacatttgccacatctttccatacattgactcagcccctaaattctcctctgcagtttgtgctttctgtccatcttcctgggtagagacctactgcagctattggaaatttgagcaattaacctagtcaaacagggttcaaatggtataagacatttcagacattttctgtgggtttgtatagttgcgctccactgggataaaaccagatgataattttcagtttaattccattcaacaaatcttaattgagaccttaactgtgccaggtaccatgatacataaatgctgtttgtaagcagagcagaagtttgcagcaggaaatttcaggctagccactgtcagcccaatccacgttttcactcttcaattcagaatgggtttttaggcctagggttctgagtgtgatgtaagaaactagacatgccagtctatggataggaattcattagactctcaggtggactgacctccactagtccttgtacaaaggacttttagcatcttagcagctgtcctatacagtaggtgccaatatgattcccattttgcaggcaagttaactgatattaaacaggtgtcccaaagtcacacaggtcacaagatccaaaccaaggcagcctaacatcagaccttrtgatatcatcctccacagcacattgccttccttgaattgttggcaaatggcccraagaagagtcaagtcaacaaacagcaatgygctsaaggggagggttgagtcttttkggggcctttaagccacttgggaagatgggctggaaatgtgtgaaactcaattaccttttgaactctcactaaaatgtgcaaaacccagatggaactatgagaaatccttgccaataacattagctcccttcagatctcctgccgtaagagccctccatgtgtttttgaaaggtcagagtggctgtagttttcttcagcgtaggtcaagttcatctcccagacatctggggaggtgctgatgtgcgcgcaccaagagtgacatttgctcattcccagttcacagtcccagtgcacactgggtccaggcttcccctcaggatctatgagcagaaggataaggatgaaaaacatatatgtttccatcagaggggaaacggctgaaccaagcatagagcattcctaaaaagaaatattttgcagtgtattaaaggataatgaaaaccactatttgcatgtatcgagggtgtccgtactgtaccgtggtgggaacatgatggcacagaggtcccatctacgtatgtatgcccctgctctcaccaactggtaatcaggggaagagtcatctcagggccataaatgtcaccttgggtgacagagttgactcacttttttaaaaatattttatatatcacttgtattttactttacactaaaaaataccaattctgttatttttctttggcaggagggaaggggttgatgataccaaaaacaaaaacttgcaacatactaaaaccaaggatatgaaaataayttatatcagagtccaggaatgttcccacaaaccacagrgttgtggtttggattgaggaatctaaccatgaactgtctgtgctcttcatctgaaggaaaacagagcatgctttccacaccaaggagacttggacttcattgatcctcaatagaaaggatttggttgttgttgttaaatgtgggttcttggtattttgctatattgctaatctttctgtggtctcaggtctaaatgggtggaaacacatctctaattgataaataaatagaaaaatatgctttatgtgtttcttaaaagtcaggaatatgtcttacggtgatggcatgtcagaatctcctgggaggtttcaaattacaccgaaaacattgccagagagagagactcttccccctccactgcccaggggaggctccattcctgacccatcygggtgtggctagaatggggaaaaggctgggacccaccacccgctgctgggaggttacatgggctgacccgccttgcctcctctcctcagccacgtgtgcatgtgcacctgctgggtacctgggagctgaggtctctcttgtgaagaggagttgaagggcacccatcgttggaacttagacacacatgggaaacagcagaaagcagattctgagcagggacctgggggcccttcagatacaatggcccccatgagaagcagaagaatggcctagggagccagggtgcccaacacagcctgaggggtagaggtgaacatggtagctgttccctccacccaccaggccctggctgccctagggattaaaggacggtgagcaaacttcaaaagcagtccctgtaaactcttagggcccaggcaactcctccgcgaggcccctctaagacagcaggacaacacggaggagccactccctcctggcaaagtaaaactgagcacaggccaggaaaaagcacagatgcggggctgcagcctgggcaggcagcggcggcaccagcacaggcagcgcatgaaccacacgtctgtgatgtgctgagttgcagaggctgagacggtagaagctgcgttcaagcatggccgccagaatgtcagcgcagaaaaagaggggagcagtgctacaccccaggagcaggggtggcctgcaacatcggtcgagactcctgagatccatggagagaaagaagtgagcaaagccctgcaagctcacacacacaggctctcgaacggggccctggggcccggtatttaagtaacagattcacacccacaggcagagggagcggctccgctactcctgtagggtcttattttactttatcctctgaactctatttatgccaagtaacttagctcgaaacctcagcatttaattttgcttaaattattgggatagtttcttcatacctagacacactatcttagatccagagactaaggaaaagtattttctttctgtctcatacttcctcctcgtttgtgacctgtgttaacagctaatgtaatcaacttccccacaggcaattgtttagtttaggggagataaatatacaagataaataaaggaggtgcaccattactagaaggtgttttctcattcatggaattgcacacacagcaattcatcagctattgttttattttccttcagctattgttttagatttgaattgtacagttgctgtattttgctttatacaaatatgccccagatcatagttcatggctctggaatatattttatggtatatatgggactggcttagagtcatcccgtctgtggttatgtaaagccaaaccacgttatcatagctttgttgcacagttattttttttaaaaaaagctatggcttgtttgttgcccatgtcagtccgagaaaccagtgtaattctgactttggaaattccaccttatggtcttcccaattcaaagcaaatatacaattctctgttggcagtctgcgctgcagtcccctgggctaggaaaccccgtcgccacacmccctggttgagaggcatgcaacagtgatcccacccsctggttgagagtggtccttgctgcaaagtggtccttgctgcaaagtactcgagactcagatttcttccctggttgctcatgattgatccggtgggcatccaacctgagttagaacagtyagagaatcatgctgaaaatttagacctaggtcagaggragtcaagttggtctctcttgcgcttgaactctggtatgtaaaccacaggaggtgttggcagtgagagaggagaaatgagcttagaggagccaaagggagaaactggatgagggagggcgatatcactcatgtccctggagttcctgaggcccaactgcattcctgaccctggattccttgagataccactgtggccttagagggcttaagctggttgaagattacctgaaccaaaatatatctaattagcacaagagatgttggtagctaacataaaaaactaatagcaaaaataggtaacaattaaatagtgaagttttccagaagaagaaactgagaagagggaggttaaatgcttgcacaagatcacacaccaggcagcctggccccagaacccagagtagcaacctctccatcgctcacatctcaaaatagacacagaggaaaaggcctggtctggtgtcaggcagatgtgggtcagtttcctcgctgaaccacttgcctggggctaattattgaccctcggtttcttaatctgcaaaatggagatgaccaaaaccataaaatagaattgttgcaagggtcaatgagatattgtaaataacgtgccctttacccagtaggcatttgataaaagttacttctaatctgtttccaatttttcatttataattaaccgcggtgactagaactgacagaatattgtgaagagtggtagtaacaagcatcagtatttttactgttaaatatattgctgagatagatgtgctttattttgttaaggaagcattgttctattgctggtttactacaaagatttttttttctccagaaattggtgatggatattttcaagtaactttccagtttgtaaccaaaaaaaagtggtatgatttttgtcttttgaccttatacttgattttagtaatagaatttttaatactgaactatccttatctaattgaacatccttaatcattttgcattattctgggaatgaactagtaggttcaattctcttgtgttaatttaggatttatgtacaagtgcaatttctctagttttctttcttgttgtatcttttccaggttccactttgtgtttatggtagctcacaatgatgaattaagaagttttccacccttttctgatttctggaactgttgaaatagcagaaaggtttactgtccttgagtttttgaaagaacatgtctttaaaaatatgtrtatccagtcccagtatcaattttggagatagtcctttctcctcaaagtttcctacttggcactgtggttatcggtctatttaagttttctacatcttcctgaataaatttgaataatttttattttgctagaaaatttgtaattcattgagatatttaattttttagcactaagctgaaaatagtaatctcatttaatgttatcatttatttcatatctgcatatatttactacctgctttgattcccagctctctttactggaccctcaggggccacctctaagtgcggaagccacgggcccatcacctctgtgctgacctttagtcttttcctggtttggatcatctcggtcatctcgacctagatggccacaaccctactatcatgttagaagcattggttacaatgccctagagtctatttagagtaggtgagccaatcttctattggagtagaagataactgtttttatacacaggttgtggttactgtcttggagactggtcagttatggggtggtcgggaaagggcacccaggaatgaagcactggtggggtacccaggcccaaggacccattgtcccagaagccccctatccacagtgccccatagcactttcactgaggttttgtttgactctagtctcttcagagtcaataacactagcatgttatttcatggaaaaagaatcaactacttcaaacataccaatttgaagtgtttttataaatatatttattctrtggaatcagataatctattcattttaacatctttatagcagctatagagtaggaaaccctctgagtctaaaaagagccacataaaaggcattggagatagattagttggaaattccaccagggaggatctgagaaaattcaccactaaatccccgataaggtgaaaacctacttagagtggacaccaggaagactccagttatgaaagtaggtgccagagataggcaaggcccacatggtggggaaagcataggatgctagaccaggcaggcaagaagctggtttaggagcaggcaacaatggaaccaagcccaggtagcctcagcattttgctaagcaggttacttgcaaaatgctcaggaagtcaatgctccgacaagcatttaaatcagtaaaggcacttacatctggaggtggccaratctgtatggccagttcttcctagcagtgacctcgttctgtcttttatgtggctggcarttttaaagagtgatgytcattcagcttatctcttaccatattgtgattctatgtaactcttccccactatctgcaagcacaactgccatatgggctccatactcaaaccctccacctgccagcatggaccttaggtaatgtagataaaatgcttgaatgggtaaggacgcacatccagaaagccctctgtgtcactggatctgggtcctcttccagttcagtgtgggctttttatctaagatttctgaattccccttcccagtgcttttctcttcttgggtcctcattctccacggtctgaaaaaggttctggaaaaatgactcgagtctgctacatggctggaagaggaggcttcctttagtccctaacaagcacacagggattgttcayggtaaagcaaaaggacaagaacaggtgcctccyttgtgtcatcaatgagaagattccttaagcagcttaagatgaatgctcaaacacatcaaataamagtgcaaactaaaatatttaacaatgtaaatttccacttaccgatttctctgccttgtctgtgttccaggttcaggtttagcggtcgcatcctgggtctggctctgatccatcagtaccttcttgacgctttcttcacraggcccttctacaaggcactcctgagactgtaagtgctttgcagaccatgcttccaacccagccctgtctgcrgggcaaggacaccgacctctctggtgccactgacccttttgtcactattttgccctaaccattcctgttagggttatggtggcttcctgttctgagtgcttagatatcacwtacattttttagcacaataaaaaggtatttggggattttgttgttgttgtaagggaagattctattatcaaaatctcatatcatggagatgaatcattttatataaaattataataatattacaaacattgcattaaactgttaagtagaactgatctgtttatagcataactgttttaaaatgatagttttctccaattttcatgcagagtccctgagtcaatagttatttcatgtttgttattgtaaacaatttcacatttccttttcaaaggaaaatcattgaatgaactraaatgactgaatratctgattcatcagtggattcaaaagtatccaaytgttaggataagtctgtgatgttttagccaggaatgatataaccacattttgaagtgaggtctgggcagccatttgtttggtaatttgcytttctcactgaattcacccaggccctgtgatttgagtgacctggaatatttggatgaggaattccaccagagtttgcagtggatgaaggacaacaacatcacagacatcttagacctcactttcactgttaatgaagaggtttttggacaggtttgtgtgacatggggtttggaaaagggattttgttttttactatggaaaatgcacataacataaagttatcatcttaatcatttttaagtgtagacttcagtgcttcagtatatccacattgttggccatccaatctccagaactttttcatcttgcaaaacagaaactgtacccattaaacaataactttccatttctcccacccacaactcctggcaactaccattctattttctgtttctatgaatttgactactctagatacttcatataagtggaattatacaatatttgttyttttgtggctgacttatttcacttagcataatgtcctcaaggctcatccatgttgtagcatgtgtctgaatttacttcccttttaagactaaataatatttcattatgtagatatatatgtatatgcacatatatatacaaatatatatagtattcttcctttatatgtatataaaatattccttcctttttaaagctgaaaaatatttcattatgtgtatattatatatatataaacaaatatatatacatatatgccatattttctttatccattcacccatttgtctgttgatgaacacctgggtttttccaccttttggctattgtgaatcatgctgctatgaacatgagtgtacacatatctgttcaagtccctgctgtatagatcaattcttttggatatatacacagaagtgagattgctagatcatgtggtaatgggattttgtttttaaattagcgaataagggatctcattcattcaaaccaattccttgggaactacttcctttaataaatctgcccgtgtcctctttcttctttttcttgttatgacctggatctactttatggagttttttgaaaatcagatatgataatggatcagaaagcatttttgtgaagtacgtcatacatacgtcagggatttctgctatctgtgccattacagaaatgattctttttatcacatccagatagctactcctccaaaatacatatatctcaacactaaataataagataaagtttcccatttgttttctactagcatttatataacatcaaatcttcggatcaaatgggttacaattttaacagaaaataaccatagcctgagtagatttaacaaacaaggtttggggaacctcattttctagacctaaagtctgtgacataaggtaattcgtaacagcggttgttgtgatagttaaatcagaatgctttagaggtgcctcacatcaatgtggacagtgcactgggtcgctgcatgagaatgaatgaatgctgcaggccaccaagcaccgcatcccagtcaagaatcttggttaggtcctggaaaatgtcaacattctgttgtatttcttctgtaaaaacatgcctctgaagaatgctgtcttacgtatttgagaaaaaaatatttcttcctacaactctggagagcacatttaaatatgttcaagaatatgctactcatggctgggcacggtggctcacgcctgtaatcccagcactttggaaggctgaggtgggcagatcacctgaggtcaggagttcgagaccagcctgaccaacatggtgaaaccccgtctctactaaaaatacaaaaattagctggggatgatggcagacacctgtaatcccagctactcaggaggctgagacaggagaattgcttgaacctaggaggcagcagttacagtgagccgagatcacgtcattgcactccagcctgggcaacaagagcaaaactccatctcacaaaaaaaaaaaaaaaaagaaaaaaaaagaaaactactcatttaacttycctgccatgtactcactgaacaggcaaaatacactgttctctgtgcatgactacttttagcccatctttcacatatgccctattgtagagggtaagtttgtaaaatatacacaattacttaacaaactgtattaagacaactgggtagccatctgtaaaagttttaagttagatccctaacctaactcatgacactaaataaattccagytggatcagaaacctgaatgtaaaaatttttwaaaaaggaaaaaagagataatttttatttttaatcttgcactaaagaatgctgatacagatatsgcacaaattctcaaagtcatagaagtcatctgacatagtcaaatattatttttaaatttctgcatgacaaactatactataaacaaattgaaagcaacataatgtttaatacataacataaagactatttctttcaatatcagaagagatcccacagatcaataagaaattatcagtcaacaacctaatagaaaagtcacaaagaatatagatagttcccagaaaaggaaagacaaggagataatctcatttacaattttttaaaataaattaacgctatagtgagataccattttccctcattagaatgtcaagaatcagaaaatttaccagtattttgggatggtgtagagaaacagaccttcttgtccattgtaggtggaagtgtgattcactctctatgaaaggcactttggtgatatcggttcatattttaaatcacatgcctttgactcagcacacatgtctagaaatttgtcctaccgatacattaacacctaawtaaaattactaatatattaggatcttcatcacagccttgttgatagttgaaaaatatctgtaacagtctaaatgtccagcagtagagcactggttaaataaatgatacatttactaaatgaagtagtgaaatcatgtggggttattaaaaagcatgaggacaccccaacccctcaattcacatataatcatgagcaataaacagggtacactaacaacaataaagaaagaaaaacacaggtctaaattggcatgaaaaatgtctaagatatagttttaagagaaaaargatagtgaagaacagtgtgtaaaacacactactgtttacagggaaaaagagtttatgttgatcaggcacagtggctcatgcctgtaatcccagcactgtgggaggcagaggtggaaggatctcttgaagccaggagttcaagaccagcctgggcaacatagcaagaccccatctctaaaaatttttaaaggtgatatatatacattccccagcatatgcatagaatctccctggaagggaagtagagatgactgtctccagaaagggagattgcatggctgggaggttaggtgggagaaaaactgacttttcattttatggccttctacaccacttgaattttattccatggccatatactgtctattcaagaaaacgaagtcaactacaaataactgaatgcataaaattagaggaaaaaataaagttgaagatacagaagaacaatcctctagtgtaaagtgtaggaattcgacaacttagaaaaaaagcttaaatgttcccagtgctaaaaataagaatgtgttgtagatctataataatgtacagttgacccttcaaaatgcaaaggttagggcgctgagtcctgtacagttgaaaattcatgcataacttttgattttccamaaacttaactactggtagcctgctgttgactagaagtcttattaataacaaaaatggtcaattaacaaatattttgtaggttataggtattataaactgcatgcttacaataaggaaagctagagtaaagagaaccttattaagaacatcataaggaagagaaaatatattttctattcattgagtggaagtggatcatcataaagtttgtcttcactttgaataggctgaagaggagcaggaaaggaaggtttggtcttgytgtctcggggtggaggaggtggaaggggggcaggagaggcaggcacacttggtgtaactttatggaaatacatcataatttctgtcgtttttgctttttcctttctctaaaaatgtgtctatatagtaccaatcctttgctttagtttcagtgcccatatctagaaaggttcattatcataaaagaagtcaaaagcagtcaaacaatcagaaccgttctgccagattgtctaacatcgatttgttttctggcactgcttcttctagatcttcttccycktcdcctggcactggttcagaagcattcatctccatcaagtcatcttctgttagttcctctggcgtggtgtctgtcagctcttgaatttctccaagatctatatcttgaaaccctttacccccaaccttttttttttttttttttttttttgccatatccacagtctctttcatgatttccttgattggctctgtcataaatcctgggaggttatgcataacatttggacacagttctctccagcagaaatttattgtttggggcttgatgactttcatggcttattctataacatcttcagtggcataacttttccagaatttcacaatgttctctctattgaagtcatccatagtgttgacatcctttccatagagtgtcatgtgtaatgagacataaagttcctatgactcctgatctaaaggctgaattagagatgttgttttggggggcaggtagaccactttgatgccttggtgttgaactcaaggggttctgggtggccaagggcattgtccaatatcaaaaaaaaaaacaaacaaactttaaaaggtagtccctttctggcaaggtacttcctaacttcgggaacaaagcactgacagaaccaatccagaaaagaggttctcattatccaggctttcttgttggcagctggtgttatcttttctcttcaaggctcgggggttaaagctttaatggataagggcaatcctgatcataaatccaaatgtgtttgcacaaaacagcagagttagcctatcacttcctgccctaaatcctggtgctcacttatcttccttactaataagggacctttgtggtgctttttttccagaacggggcactttcgcctgcattaaaaacctgtacaggccgatatcctttctcctcagtgattttcttaatggtgtctgggaattcgtctgctgcctcttggtcagcacgagctgcttctcttcttatcttgacatttttttcagccaaacctgtttctaaaattatcaaaccgtcctttgctggcattaaattttccaactttagatccttcaccttccttttgctttgagttatcatataatgactttgctttatctagaatcatattagagtctacaggtatgtatgccattgttctagcaatactgcactcacataaaagctgtgttttcagccaggcatggtggctcatgcctgtaatcccagcactttgggaggccaaggtgggcagatcgcaaagtcaagagatcgagaccatcctggccaacatagtgaaaccccatctctactaaaaatacaaaaattaaccaggtgtggtggcacgtgcctgtaatctcagctactcgggaggctgaggcaggagagtcgcttgaacccaggaggcagagattgcagcaagycaggattgcgccactgcactccagcctggygacagagtgagactctggctcaaagaaaaaaaaaaaagctgtgttttcaatatgagataaaaagatattccacaaaaagtgccaggttttcacacctgctggcatagctgcagtgatggcttcatgaatttcgttttccttttttacaatggtccctatgctggattcatttattttgaaaagatgggcaaccacatctgcagacctcaatctatggtgcctatcaagtaattcaattttcccttgtaatatcatgatttttctctgcttcttgggagtatttccagcatcattagtggcccttcgtgtgggtcccacaatgttattcaaagtttacaatattgcacttaaacacagtggaaaatatkcagtaaacaagaaagatcactttttactgtgatacacagtttactggagagaggctattcatcagcaacacttgcgttcatcgcaaaaaacagcaggaggtgactacaaaattattacaatagtacagtatgtactacagttaattttatgcagttatgatttaataccgcattttgatgtttgtatttgtctcaactgccagtggcaccatgtacaggctctaagtgtttgtgtgtgtacattttcataaattttaactttttaataatagatttgtgtacattttatgttagtaaatgataaaatagactagtatctacatatattttatggactcattacatttctaactttttttttcattttaaaaaagcttctattaattttctaggtatgcaggtcatctgcgagttttttcaaattgttgtaagtctccaaaaaaattcccaatatatttattgaaaaaaatccatgtacgagtggacccatgcagtccaaacccacgctgctcaagggtcagcctgtatacctgtttaaagtttatctcatttctcttcaaaagggggtcaccaagaacaatgagtggttttagaagattgaattgcagcccttcttttgtcaagttgttagacagtggagagcagagggatgcaggtgaaagacaccgtaggctttaggattagattcagctactagtgaagaagccaaaaatgaccctgttgaaattaatagaagctttttttttctcatataaaagccctgttgaggctgagtgtggtggtccaygcctataatcctagcacttcaggaggccaaggcgggtggatcgcttgaggccaggagctcaagaccagcctggccaacatggcgaaaccctgtctgtactaaaaataaaaaaaaattagtcaggtgtggtggcatgcacctatagtcccagttacttgggaggctgaggtgggagaatcgcttgagcttgggagagagaggttgcagagagctgagattgtaccactgcactccagcctgggtgacagagtgagaccctgtctcaaaacaaaaacaaaaaaagctctgtttgataaaatcctcagggatcaagctccttccaggtctccccactgctatcgctagggtaggccccctgcactcttagcccagatgcgtacagcatcccaaccatcacaactgtgttcagtgcagccggacaaaggaacrcacagcccatcccttcaaggaggcctcctgacrgtgccatacacttctgcttacatcccattggacagaatttacttacatgccacacctagctgtgagagaggttggaaaataaagtctttaactgggccgctaaaaatcagacattccaaagaatatggatgctgggtggtaacaagtattttatcattagccaatattttataattggcactaatcacctaagtgataaaagaaaaaktcaccatcagactacttatggactgctttgtttaggtacctgtgtccacaagtgccaaacatatatgtatttttttctttaaaccagtaactaagtccagtgatgcctcatttgtcttgcagcattgagcattgcagtgagcccttaagtgaatttaagatgactgaagattacccccttcatacatgaacatattttgattttttaaaaaatgtctagcatgttatctacctccttgcctgtgaaaagatgatacacagataatagccttccctgatgactcaagcatgtcctaacaaacaggcatcatcacacaagtggcagcgccatttgctgtgtgtgcctacatgcttctggttcccttcccagggtcaggctgccctggctgtgtaatattataccccaccctctgccagaagaccactgtcttctggccagctgtgggagtggaagctgatggctgttaagaatttgctgtcattgagatttgggggcatcaagtatgtgattgtagtgttgagacattcagcttcaccattagggacaacctaggacattttccttttatttccattatgcctcttgagtataggaaacttgtttcctctgtataaaacaaaaactgtagcctttccaaggtgcttagcaatctgcttagaggtcgggtgcagtggctcccaatactttggagttgggaggatcagttaaggccaggagttcaagactagcctgggcaacatagaccacattctaccaaaaaaaaagaagaagaagaagaaagaaaaaaaattaaccaggcggagtggggcttgtctgtggtcccagctactcaggaggctgaggcaggagggtcatttgcccccaggaatgcagggctgcaataagctatgattgcaccactgtgctccaatctgcttagaacagccagagctcttttagtgacctttagcaaggaaaaaagactccagggataataatgctgaataatgccctgtagaggatttttggcatacggtcatccccctaaaatcagtgtgcctccctgagagataagcagaactgacaagcatcgcaatatttctgttttcctacaaggtcacggaaagggagttgaagtctggaggagccaacacacaggtgacggagaaaaacaagaaggagtacatcgagcgcatggtgaagtggcgggtggagcgcggcgtggtacagcagaccgaggcgctggtgcgcggcttctacgaggtgaggcccggtggcctggggaaggcaagctgtggccarggtgctgcttcacggggcctcatcctccaggctccctgagggagcagcagctcaggtggtgaaaacagagagggagagccaaggtgggcagtgggctcagcgagtgctcctcaccagggagtactgaggatcttcttgtggtggagggctgaggggtcagagttctctgggaaactcaactcttatgggtgaaaaatgctttcaagcaactggcatgtgaccctrgcgtgccagacgtgaaaacatctagcatctcttgtcacaatatatgcagctggtgtttcctttcagtcaatgaaacaaaaataagtgaagtgaagacattggggggtattgtccactgtcactagaattttattttgttatagcatcatgttgtgccacgtaatctatgctgagtggtaaatgaggaagacagggagggccgctagacatcctatgatgtccttgaactccagtttaaaaaccagaggctataaacgttttctcaggtcttgggtcgtggaaggctctccttccctgccagaatggagaagtgcactggccatggtcttgtccaccactggtttgattaaaggaggtaccaccacaggacctcagttgtgcctgggtacacttggcacaagatgcaaagtcagaatgcagaaccctaacaaaacaagtcttcccagatctctaaggagggaggaaggaagtgagagaagaagagaaggaaaagacaaatttccacccagctagctcagtccagtgagcatgaggcttttaatcttagggtcatggtttgagaagggatggaaaatacagtcgttttaatacaaatgctcaattttaggaaataagtcataattgcatgtgaaaggttacattttaagtgaaatagtaatactaatagctattaaataagtccttcaaagtgatgtggactcttggcctttaaaatccaatattatttgaaaacttcaatgtgacttaagaaagtcgagtcagatttgtttacagaatcattctgagagggagcattaggagtggagcatgcgattcttttttctgttccccgctcatgaaggcttgtgttctaaaatatttaagtcaatgatcatcgttcaagctgctataacaaaatactgtgaggtgggtggcttgcagcaacagacatttttttctcacagttttggaggctaggaagtccaagatcaaggtactagcagatttggtgtctggtaaggggccaccttctggttcatagatggtaccttctccctgtgtcttcatgtggaggaagggacacggggtctgtcttgggcgtgtttaataaaagcatgaagctctcatatctaagcaccccccaaaggccccacctcctaatacgatcccctcaggggtgaagatttcaacatatgaatttggggaaggaaaaggatataaacattcagatcatagcaataattttcaagttaaaaatgattacagactcaaaaaaagtattgccagtgatggtcaatttcccagtttaacccacataaatataataatgaacatagcctttccatgtgtttggacctggatgctgaagcctaacctgcatttcaggttgtagactcraggctggtgtccgtgtttgatgccagggagctggagctggtgatagctggcaccgcggaaatcgacctaaatgactggcggaataacactgagtaccggggaggtgagtgggcaggagctgtratgatgcaatgatcacaaatagaactcagcactttccaaaagattgttttgttgaggtgaaattgatgtaaaataaaattgactaaagcgaacaagtcagtggcatttagtacattcacagttttgtgcaaccattgcctctagctacttccagaatattttcatcaccccaaaaggaaaccctgtacccatgaagcagttgctctcactctcacgcccctttcccccaacccctggcaaccatcaatctgccttctgtctcaatggatttgcctattctggatatgccatataaatagaatcatacaaaatgtagtctttcgtgtctggcttctttgacttagcctactgttttgaggttcatccatgttgtatgtagcatgtttcagtattttattcctttttatagccaaataacattccattgcatgtatatataactcatcactttttgaagactacaaaaagcttggccttacttcagtacaaagcaggagcttgtacatgcctttctccaactcccaacctgaactttccttcaggtgatatcgtcctcatattggtcgagtctctggcttaactcgatgtagaggcttgcagagaacattccatccaggacccagcttctgagcagtgtgcatggctccagggaagggtgtctcatttcctacagaattggagccctctctgcctcaatcctggtttgccacaacacggttctaaccgtggccttcaccaaagctaatgtctaacccctcctaaatactcaccttgcacactgccagacctgtcttcctgaaacattgttttcatcaggccacttccctacccacaaaacaagttccttattacttatagatttgaagggttttgttagcctcacaactcttcatttacaatatcacagagaaatcccatcaatacagtagagagtgagctgggggcatcgcctcagcctccctcatgtccccagtacactcagccccgcaatgcctcttatagtataaaatcggtatagaatgaaaaccgctgtctgcctagctgggcatggtgactcatgcctgtaatcccagcactttggaagaccaaggcagacagattgcttgaactcataagttcgagaccagcctggtgaaaccctgcctctaaaaaaaatacaaaaattagccaggtgtggtggcacatgcctgtagtcccagctactcaaaaggctgagatagaaggatcccttgaacccgggaggcagaggttgcagtgagccaagatcatgccactgcactccagcctgggcaacagagcgagattctgtctcaaaaaaaaaaaaaaaaaaargtctctgcctggctgttaaggccccataacaccccccggaaatattccttcctgccttcaccagacacacctctactctagtggcttactgttgcctgcatatttcctcctctttcttgttattctttatttttcctgccaggaatgtcctccttcttccctccacttgcacaagccctttgcacgctgctcrtagcttcacttcctttctgaagttttccttgcttctaccttggcacacatagatttctcctctctctgaatgcctcttgcatttgcagtcaatggcaaatcgtttaattgatatatccaagcatggtctccccagcttactgtgagagggacccagtacttaatccatgggcccagcatgtatccatccagggctggcctgagagcagctgctcaaggggagagcctgggatctcctgttcacgaaactggctgttcgcctccagcctagactggtaagtcctagactctcccgtggtatgtggttgccaagagctaagacagcaaaacaaaggaaatatgatgcaatattatattcataggccctttggtctctaccaggcccttctactccttatctacacctatatgaggcaggaacattttaagtggagtctcagttgtttaaayagaaagcagacatctctgagaacatcacagaacataaagtccttttataaaatgactattttctaaatctgctcttgttctaaaacttgacctggttgcacaaattgttttagacctctctaaaggccaycacaagagaaatcagatcaaaagcagcggttccgttcctatcatacctgatgtgtttgatctctctctccctcctcaccccttcctcttttctccacatcctgtcttcctccctccctttgcctcrtgcaggttaccacgatgggcatcttgtgatccgctggttctgggctgcggtggagcgcttcaataatgagcagaggctgagattactgcagtttgtcacgggaacatccagcgtgccctacgaaggcttcgcagccctccgtgggagcaatgggcttcggcgcttctgcatagagaaatgggggaaaattacttctctccccaggtacagagctcctgccagccttcggggaaacctgctgaagagggcaaagtatactttgctatttgattttgagtgaccatcytttgggatggaattctttcctgtcacccaaagtattgtcattggagttattagggaaaggtgaaggtgaggtggctgtgagacttgcaytgaaactatattattcttagggaggttttgatgactgatggtatttgagctgtaatatcttggtccatgtgtcagttgtgggatgctgtcatagcccaacttaatttaaagatgaatgtctgacacaggagagggcagaggcaaggacattaatataaaaatgctggaacctggaagtaacctctcgagcatcgttatctgtacttctgcagcgtatcacttgatacttcataggatcattatatatttgtggtgtgtcggatttttcctatcaagttttagaacatgtggggatacatgtatctctgggtctctatggtgacttctatttagaaagcacatctattgtgggataaatgtggaaaaggagacrctggggctccaggcagttttacagaagaaattccctgcactgtgagttttaatcccagcacttcctgaatcctttctatgccactctgggtagtgcattcctgatcaggaagcactgaagagacagttgtgcrtaggcgctatagtgagaaacgctgctgcaacagacagaagaaaagattgacccctattatcttttgctaataggatacgttcgaattataaagaagctttgcatttaactcagctctatttctacatggccacccaaatacctttgctaaatccttattgcagaaggatttactggactatagctttcacctaggtttcccagattttccccgaggacaattcacctggtgtcggtcagcattcatgggcatgcccagctggttaaccacagctgaacaccctggtgcaggcttcagccctggcttcacccactcagttcagcagaccctcagytccaagggtctttgttgtttgcatggctctaccaatagctaaacctagtgaatgtaagtctggcaagaaaagaagactaaaaaggcagaayttrcatttgttaagttgaatgatagatttcaagaatatagttatttggaaacatcttgcttttattttagagaaatgcagcttgagtcatcactgatgatagcatgcagcttgaggaggggctgagctacaaccacacacctgcccgtgggaacctgcaatctagggagaacacggcctgatagtaactaatcacagcacaaggtagaatcagaggagcacagggggtaagagcagcgtgctgcgagagtgtgaaacagagcctcctaatcaagttgcctagagaacatgccactaaaaaactggcatttaggggaggattgggaggcaaggaatagggagaagggggcttccaggctgaagcaataacacaagcaagggctgagagcggggaatggcagcacgtgttcaggaaggtgcagcyggccagtgcagagggtaagatgcccggarcaacatcacaggggatgcagttgagaaagagtttggtgagccacaaacaaaagaccctgctgtctgggcgcagtggctcacgcctgtaatcctagcactgtgggaggctaaggcaggcggatagcttgcgcccaagagttcaagaccaacctgggcaacaggacaagacctcgtctctacaaaaaatttaaaaaattagctgggcatggtggcatgcaccggtagtcccagctatttgggaagctgaggcaggaggatgacttgagcccaggaggctgaggctgcagtgaactgtgattgcaccaccacactccaggctgggcaacagagtgagaccttgtctcaaattaaattaaaaaaaaaaaagaaagaaaaaagaaaagaccgtgctgaggagtctctattctttaggaaatgagagtcattgcttctgttatctggggtcacagattgaatgtaatttccatatttgctttggaagctttgaaatacacattaatattattaacccacacagagagcttctaaggcagacattgggcttatgaacacgttcttcatatctgaaccaaggcacccctaagagggctgctgcaccacaagcccccgagatggtttcttggggaagtagggacctcttcttgggacaagaagcaaatgcctctaagaggacactgaaaataactccctgaatagtgacccctgtccaatctcctttggacaatgtctgaagatcaaagaacctaaaaaaaatgtcatctatgtgtggatagaaagaaagaacctctgacttccagaaactgtcgttcgggaagacctgacctgactatggcaggtgacaggaagccctgagcaggcaggaagcaaagcagacccagggtggcatgggcttcccaggtactgtgagccacagtgcatgtggcctgcactctgggagaggcagccttcagctctttcctcaagtccttcctctgcagaaaggaaaggcaactggcttcccagatgagagcgccagacaccgccacagcaaaacccggtcatagcccaggctacataaaacctttgtgtcagtccaagcccctgcctgctaaaagatgtgtgagggccaggagaaaggactttgagggtagaggcttctgggatataatttcatagttgaagtagatgagaggcaggactgtcactggagttgaggtcaaggaactgggggcttgggtgttcaccctgtcagccatgtggacttagttgccacacagtctggtaggaggacttgaagtggaaaagaagacttcagcaaagtgccagataatagtcataataagttagaagttcagagggtcagaaggaaccaaagatctatctggatcactgattttcaagcttcttaaaccatagtccacagaaagaaatgccttttatatcacaactcaggacatgcacatgtactcatttgcacgtatgtgtgtgtatatctgaaactcaagttcctcaaaacagcactttacccttattatctgcaataaaatctattttctgctctatcctatttcattaaaatgaaatgccagccaaaacctatggttttaaaaataaattatctaaatgacatgagattcaaaggaatggaaactgatcaaggattgcaaaagtcatgacgtggaattgacagcagggagtgtgaagaatgtccatccacgtcacagcgtgtggggcagtgagcaatttccacccatgagaactggagatgggacactaggacccggaggcagcatctggaaagagcttaaggaggtggcaaagtttctttactttgaacaagagctcaaakgaggacagaggaaaggctcagaaggaaagagaagggcagaagctaggtcagagtcgaagtagcactgggcagtgtggagatagaataaaggagaggggagaatctttgggtttacctttggggcagggaccagggatatcaaagctatgagtcatgagcaattaactggcctaaaagttgcaaacgaaattctaatatgaacatgtttcactgcagatgtaaactaagcccagacccagggtggagttggaggcctggttaagttagtagttggtttactctgtagcagtgattctcaaagtggggctggggaaggcgactttgcccctcttcccccgcaagaggcagttgacaatgtctggagacatttttggttgaggggaaggggtgctactggtgtccattgagtagaagccaaggatgctgctaaacatctcacaatgcacaaaacagctcccacaacaaagagttatcaagtttgaaaagtgaatcgtgtcaagctgagaaatgctgctctctagtacctaaggccagaagaggacctacaaaggaggcctgagggtgccatcagggagcttagcagagaaaatggcagccattgagaaaccaaggagaagccaaggagggagatgttccagaggaagagctgtcaaatgcttttaaagagctggagcaggtggagcggtatgggcttctggatttagggatcaagaggttattggcaaacttgaaaaagagtaaatttagaaggaaagagagcaaggcctatctgaagagaacaaggctgtagttaggcagtggaagaagattggcatgaagggaagacacaacttacataaccggctgaacaattggcagcaaagaggagtgactgctgccacttttgtgtgtttctagacaaccttaaagtggtctctagtagagaggagcaagactttctttggccctgtgttggttaacatttcaatctataacttggaaaaatagaggagacggggagatcaactgtgtagatgacacagttagaaggataaacaatacagggattggcacaacccaatccaaaattatctcaaaatgctggaaccctagcttgacaccaatggcatggaattcgacacaacttaaagacccgtgcagatctccaaaacatccatcgcaccaagtgtgagaagagagtgagtcacctgccagtaggtcacgtgcaaaactccagaggcttcagttgccacaagtatgacacggttccccaaatcattatcacaatcatggttgcattattaagagaatcttatgtttaaatgatgattcacaggttacaaaacgcatttatgtgtgttctggcgttgatcctccccataaccctttgaggtgcacgcagcatatattattatccccactttacaagtgagaaaactgaggctcaggaagattaattgacttttccagtgtcataaagctggtaagtgactagaccggggtcarcatagaagtcttccaagccctggtttcttgctgtccactgccccacaccacsgggcaatgcttggtttggtgcacgggaatgaggtaagcaggcactcggtgctgtcagaaccacacctggagggtggtgagctcttaggaatgctgaattggatcatgatttgattgtgttcgttcattctagatgacaaactaagggagttcaccaaggctctaaataaatgcaataaaagyaactagtaagtaaaccatgagtgttcagactaggtgctattcgtcaatgctttctgtttactcccagaaatgatcttttacagaattaatttggttccaactaatttgtaaaggtgattttttttctgtaatatttccactcatgagtgccagttaaaatgaccagaggaagaaaactatgaagatgatgcctgctcctatctcgcccctggctaattcagctagttccaaaagcatgcttgggatttttcaccccacttcgcctgtttagccatagcccaatgtatgttctagtttcattgcaatctttttaacatagagagaaatcactgtaaccatcctactcaatttactgagttccctttcactcaaatatttacatctaggtaaagtatttcaattattttcttttaaagtaaaggaaggcctgtttgaatcttagataataatttaagaattctgccaatctgtattcgtatgtttcttcccagttatgtctttaaggcctaagaccagacactctactgccctgtgcctgcctttggagcttgwgcggggaaagggacagggaggagggaggtaggggttagrgatagttccccaaggactgccaggaggaggaatgggtgctgggcagatgaaaacaccagcatcctccctagattctcgatgggcaggaaaccccaccttccctctttcctcttcccatcttccttattcccaaaataatctccccccrtaacctgagtgctgcatcagcctgggcagtgatctgatactctgatttatatactttaaaacaaaggtgtaaataatacacaagtcccctagggatcttgtaatgaaaagaagagtttaatatcccaaataaaactctaatgaagagtttagttttgtttgtttctttgtatgtttgttttgtgatttgattttatttgatttggtttgattttagagtgcccttttctgtgctggttggtgtctgaaaacaccatttcaacacaccacccttagggaggaaaaggcaggaaatgaactttcacctgcacccatccacctttctctctactacggtacaggactcggcatcagccaaagtttctgtaaaaacaaagaacttctggcagggagcagctagtcaggtgattcaaggctccacagcagggaatctatgtgtgctgggcttcttgtacccactgctggagasccacatgagtcttccaggtccaggtgttagcctctggcgaggaagacattccttgtctaaggcagacactggccatgcaggaggaagcacatgaagcaagctagaaccccgggcgccaggacactccaggcatccagagaggactggctcacacgggcagcttttcttggaaatgcagcacttcgactttaggttctgtgggttctactggggtagaggagtcagacttgtctccagagcacacttgacttgaatggagaactggatctcagaattccaggccatctcaggttcctctaaatagatgcatgtggttcacagaggctcagaaatcagagctgggcaagaagacttaggaatataatccttcaatactaattatatttctgcctccttcattgaccacatcaaaatttgtaactcatttgcaaatcaggctgataccatagagtttataatcagtttgctagtgtcattctagtgtagttggtttgcttgcaaatgcaaacaacccatttttagttattccattccttccaccagtctattcattctagaggaatgtggctctttagtgtgcaatgttttatggtggtcctaaatcatggtcctgctcacttttgattcctttttgaatcacaacttcagacagtcacagatccagaaccagttgtatcattgaaacaaacactctcaccaatctcttctccccattcagggcacacacatgcttcaaccgactggatcttccaccgtatccctcgtactccatgttgtatgaaaagctgttaacagcagtagaggaaaccagcacctttggacttgagtgaggacatggaacctcgcctgacattttcctggccagtgacatcacccttcctgggatgatccccttttccctttcccttaatcaactctcctttgattttggtattccatgatttttattttcaaaccaaatcaggattgacaaaagctgtgcatgaagaactgccttcttctaagatctaaccttcaggcttctctcctctgttttcaatgaactgctagcctgtatgcaatattaaaaaacagctgtctcaaggtctgtgtatatctccacatacctccattactaacaatgaaatatgaatgcaagttaagctacacttgaccaaatggtaataaatgtttacttccatttctatcattgaagggaaaatgtgagcattaakcactccaggctttcatatgcccatgtcttctgagcagagccaccattttttataatttctaataaccaactccagaactaggagctgatcaactctttgttttcctctccatctacttttccctgtgcataatatccatccaaaggacaacagtggcaaagctgaaatttttatacattcaactcatgattcacatgtggcatcagtcccatcagccggaactagcctagacatacggtgcaaatatgacacttctaacgattaacaacagcaagaaaacacctgctgctgatgcaatgcaatgcatcccaatggttgtggggattgtgggctcaactcaagagaagtttaggagggggagcatccctagtgaatactcacaccacaagaaggacaaacttgtgcacatgtccaagaaagaaagcttcttgattgaggtagcatgaaggatgaggcttcagcccccattgtcttatgtagaatgtggcaatgccaactggagaaagggaagaaggacatattaccttggtttgaatccctgagttctgtactgttctgttttgtttagtctagccacagttcttcacaaaggaaaaaaaaatgtgtagatgataccatgacttttgttaaagccatgacttttgtttgcttggcagacaaaccctttttttaaaactttgatatttttttttcacatttttttttccttttcctttcttaatcatggagttcaagttcctttgcattcgattgtccatcgggaccacactaggaagctgcagagagtgatggtgcttgttagggatcaagggcaacatagtacttctccttcacccatagtaatcctcctggggcagaaacataacaccccaaaggcacgttgatttgtatcaaaataaatatccagtttcttttagcattcagtgaaaacatatctcagaaaacttcatgttgtcagaaaaacagctgcaggctccaaagacagcctaacctctcaactacatttgaaataaacccaaccataatggtcatttgctatttttctaacgttgttatccatgttgcctgaaataggtcataaatgaaagtgtttttcttcactgggaaaaagaagagctcaagagaccccactatttaaatgtcatttaattgttttccatattaaaacaagggagaaatgtaagacgaagtgaatttcatatgaagccaatggctcattataccagtttgtgtctggacagtgtgttatttgtgttcctacactctaaagcattccggccaggagcggtggctcatgcctgtaatcccagcactttgggaggccgaggtggggagatcgcttgaggtcaggagttcaagacaagcctggccaacatggtgaaaccccatctctactaaaaatacaaaaattagccgggcgtgatggcacatgccggtagtcccagctacttgggaggctgaggaaggagaatcgctcaaacctgagaagcagaggttgcagtgagccaagactgtgccactgcactccagcctggatgatcaagggagacaccatctaaaaaaaaaataaataaaaataaaagcatttttttagtaggaattatctacaatgcccagcaccccttgcagcgatgtgtccgttgtcaatcaaggagtatacattatagaaatttagacttttattgtctaaaaagaatatttactgagacaggatggaatctgtaagttatatgatatagaatttgagggatatgtaaaattcagtacacgttcagcatctgaaaaataatggattccaatggagctattgttttatttatgaaatcagagcataaggactatgcaaatcattgaaccataaccttattctaactcttgcaacaacatctctaatataggggcatcttttatctttagaacttggtgttatatatatgtaaatactcattaattcaagcactctctttctagtactcacattatttgtcaggcattggaaaaggagaaagctgtttacaagatggaccagctcctggagagctttgcaatttatataaattactaattaatctattaattagattaattaatatctaatctacccatatacaaaaggaatgcagtatctcagaaattatatatagataggtaactttggcatacatgatttttcaactaccgtttccttatccaccagtactactgatgtcacagctatagatctatcccacaaagcataacaggaacattctttcacaaaagtgcaaaatttcatgaagaaatgctgatgtcacggtcacctgaaagaagatgaagcttgtaatattttattgcaaccttgcatagaatccttaaggaagaaaaacaaagagaagaggaacacagaaacaagttatggaaattcatgtttaccttatttataaggctgatttttaaattatatataatttttcattcaatatgtatatgaaatgaaatagctatagaactaaatttcacttaggtggaggtataaaccaccttaaattatatagttcggcagaaagacagatctatttgttaccacctgtaatttttttttaagcatgagttttctccatggaggcaaattgcaaaattaatcacttataaatttataagccacaatctccctaaaacaattgattttagtaagagtgtaacgcctttaatcaggggacaaacaagaacaataaataagagaagatttatgttacaactttgaaaaatgcttttaaaattctataaagtgttataataatttcatggatatcacaaatgttttattctacagtgtgaagatgataatcctaaaaatggaaattgattctgtgaggtcaggagaagtattctaaatctactgaactctttgtaatttcctatgtatataaatgagtggaggttgtgaagatgccgagagagtggtgaaaaaattaagaaaaagagacatatgatttgggggagcaggcgttaaacatgcaagatctaaattttcttttaatacatgaccatatgtccttgaacagtaagtatatttgtgtggcaagccaatggctgagttttccagggtagttttaatattacatccatcatattttcagtccatgtgtcaaaccatgtgtccaaaatttgggttcggaaatttctcagttgccacaaatattttcccagtcaagatgaaacactttcaaatgaaagtagttagaactttacataacaaatgtggtgctttattattattattattattatttttattattattattattacgtacttcagtgttcattattaaaactaccgcaatactatatcataaaaatctgggatggatgttccagccatcataaggtccaaaagaaaagagaaagtgttattttcctgttagtgacatgtagtccctttgttctagtaggaaaaaaggtgcctagaggtagtatatagagtaaatattgttcctttagcctacttcctgcagcttccaatttatccaaggaaatgtctacaacaattttgttcaaaagtctgttctagtcaatagcaggagaagtccacgttattgggctgattttgcttacatcagcaagagaaatgtcacgtgatactcaggccgcgctttctcttccatcacaccatcttcaaggaatgtcaataaactcactttggtatggcattgtgtatgctccttattgcaaacggaagtctaggacaacacataacaatctgtatcctgccttactctctcgctggatgtaagcaataaaacaacacagaaggttaccagctgctctgatttttttaaagtcccaaaaaagcataatatgtgctcacatatccatgaatagagaggagagcttttgtaacaagttccttgtgtatggctgtaagaaccctacacaaaccacacgggcagcattttttttagtgccctttatgtaaaccagttgtgcactggtttatataaattcctagctatggagatgcttctatgaaagcttcaggctactgcctaacacccagtgtcatcccaggacaacggtcaccactaggcaaacatattgtgtcctatggctcgtatcacaaactcccaagatggaaacagcatgatctccttccaagcctctaaaagacaaaccatgtggctcttactgggtggttggaagctgatttattctttaaagagaaaatattctattattagaaaaaagtgtggggaggactgggagaaggaaaaacctgacggactgatttggagacagagagtcatcttgatatggcatttttcttttattattattattattattattattattattattattattattttgagacagagctttgctcttgttggccaggctggagtgcaatggtgcaatcttggctcactgcaacctctgcctcccgggttcaagcaattctcctgcctcagcctcctgagtagctgggattacaggcatgcgccaccacgctcggctaattttgtatttttagtagagacaggttttctctatgttggtcaggctagtctcgaactcccgaccttaggtgatccacccaccttggcctcccaaagtactggaattacagacatgagccaccatgcccggccaatattgcatttttccacacgtgctgggctgacttcagatttattctaactgaaaatcacttttcttctaagtcataaagagaaaatctggactagatcatcatttatagtgaggcatagattatagtattctgctttaatcttactctgaaatcaagattggacttcaggtctcctgatttcttttttatttttatttatttatttattttgagactgagtttcactgttgttgcccaggccagagtgcaatggcgtgatctcggctcactgcagcctccacctcccggtttcaagcaattctcctgtctcagcctcccaagtatctggaattacaggtgtgcaccaccatgcccagctaatttttgtatttttagtagaaatggggtttcaccatgttggtcaggctggtctcaaactcctggcctcgagtgatccacctgccttggcttcccaaagtgctgggattacaggttgagacaccgcactcggccaggtctcctgatttctatggccatacttttccaattaatgtgctgacagctcactaattatatactgtaaagggaaaagtgacacacatagcttgtactccagacatggtttagatgtgtttatagaggatggctctctaacagaataagtgaagggagttatggaggatcaggccaacctttatcagtgctgcaggaattacatatcacatttatggctgggaataggcttagacacttttgtccaacaggtttaccttggagatctgagaacagaatagttgatgtcaaggccactgagttttaccttgaaggctaccgccttatcacaaaatatcctgtggggtcctgggctctggacctggcataaccattcaaaaatgtgccaggagcatgaggtatgcagaagagatggaacctgaaagagtacaactggatgccaggaatccaaggtcagtgtgcagtcaccaaagaaggatgtgggctgctggttcccacggcccctctgtgcaagtttgctagggctgccagaacaaagaaccccaagttgggtggcttaaagaaggctagcagtttgctatgaaggtgtcgggggctggttccttctcagggttgtgggaaagcatctattccaccccgctctcctagtttccagtggttttcttgcagtatttggcattccttggcttgtagatctctgccttcatctttgtatgactgtgtgtgtgtgtgtgtgtgtgtgt

SEQ ID NO: 94281 - DNA, 14255 bp, Homo sapiens
agaaaagaaccaagaaagggaagaggagcccagaaatcaacccgctgcagtactgacaccaactgcgggcatgggacgcttaccttggagtcagggaggctgaacacgctggggtcgtccgtactccccaccatgatcttgtgctccttccccggggcatggccgcctgcgccctcggagcgtgcagccttggcgccgtggcgctccccggacacccggtcgctggtggtgtttcccatggctgcagctcgtcggggaccacctaccgcggggaacgacaccgggctgggaacacctcagccgccgcgtcaggggcgccccccggccccgcccctgcgcctcgggacagggcaagggattccccgccccagggaagccgagccctggagccctctccctcctggcctgcgggaacgcctgcaaataccccggtgccctcactggccctagctcaggaaacccgctatcgggacctcccccgcgtccccgcgctcactgccaggggcgcccccactccagtcacctcgggcgatgcgctccctcctccaagggccactgatgtgatggctgttctgcagatcaggccaccaataaagttattgaaattgaagccgcacccctcgctggcgaccagcgattcctcctaaaatggctacaaggccggcggcgcggagtccgcccagtgcgcgttccctgcggcctgcagcctcggcgcccgggacccgccggcctctctagccgccgccgccgccgcctcgatggtgggcagtcgcacgcagcctccagcgccaggagggggcgccaggcagggcctgtcccgcctggggagactgcgcccgggataataggagcgcttggcctctgagactacccggcagaagggacgtccccaaatgacactcggaggccgcctccctgggctccggtgctcggtgccgggaggagcggcacggctttctaccccgcctcaggtgcgccagcacgttttctgggcagcatctgtgtgttaggcgaccggagaggtgggttccttatagggaataagaaaactgaaactgacttccaactgcaggcagaaggaagcagtggtcattgctggaggttaaaactgttctgaccgggcgcagtggctcacgcctgtattcccagcactttgggaggctgaggcgagcagatcacgaagtcaggagatcaagaccatcctggccaacaaggtgaaaccccggctctactaaaaatacaaaaattagctgggcgtggtggcgcgcgccggaagtcccagctacttgggaggatgaggcagaagaatcgcttgaacccgggaggcggaggttgcggtgagccgagatcgcgccattgcactccagcctggcgactcagcgatactccgtccccctctccccgccccaagaaaaatctgttcagtggggagcgacaaggaaggagctttcagcccgactggggtcgcagggaagaattcaagatggcgtgtttaggagctctagctccttgacaaattagtaaaatgttagtcttaggagaagaacgaaaaggctctcctaggctaagaaacagcatacacagtgagaaacctcagaagaaataaaattcaaggaagatagcaacaacgaaaacatcagaaggaacactaaaggtataaaaagggcaaagacagccctagggttgggagggatccaggttttttatgaaaattagtggaatccctaaggtacttacctttgtattataagtatttgcatgtctccttctagaaacgtttatcactctgtgttacacagaccagcagtgttggcgtcaactgggagcctgttagaaatgcagaatcaggccccatccccagggttctgaatctgcattttaacaagatcacattaaagtgtgtgagaagcaatgctttgacagctggcagagagcagatccagatttgataccttttcatattctgcatgtaccttatacagagtaggcttttgcatttgcggaatgaaggatacaggaatactgtttactgtaatccatttctaaccagatatgccacttaggcttaaacacggccaatgatggggaaccccaagttacataggccaccctttctgagtgagcagctctatttgctgaaacgttcatttttatattatgaagttgacatcccacttaagtacaacaaattcactactcccctattctttgctctgcctcttataaactcattctttggctcataaaccaaagacagtttacaggaagaaaaaaaaaaggtacgattttactgcaacttcttgctcacccctccaaaatctttatgtctgagtacatgctttttggttatccctacttttctccctccacccctcaattccttaccataggacactgaagcaaggcccttgaagatacataatacattaaaccttgacttgtgtagtattcagttttctgaccccaaggtggtttcaccatgccaaataatatgtccttggtatgtatttccttgcagtagtcaaatcagcctagcagaaacaaagtacgttaaccaatggaaaactgacggagagaaataaactgtttttgcacagctaaatggaaatgacttttgaattatctgctttggaagattatccatgacactgttctgccctgctctgctctaacaacatttgtaagtcactcaacagttaataataaaagtcagttttgaatattgcaggttttagacacagaacaaatgtaatgtgacactgtaggaagaatgaattctccttagtcccaaattccttttttttttcttagattcgggaataagtaaagatacaagatcctcttaaccagtatcagtataattgttccctttagatttattgctgtcaccccaatgctcttctttctttctagaggaaaggaaaagaaggaggtaataggaaaagtaatgggttgtcctgatgttactgtgtctaggatgtcattgccactggtctcctcagatcaatcattctgcctaataaacagaaaaataacatgggcagcctcacatgcaagcctttacacacactgctaaagagacctcgcttcctctgagaagtgaggatgtgagaatgaaggattgattttacagaactggatgacaggttaaattgggcatctggaggtttatattcccatctccactcaccaagtttcatcctccatttatgaccaaggataggtataacatctgatcttgatggttactgtttcaaaaaacaatctgatcttttttataaagttaaacatttacttaatcatgcagcatactaattcccactcctgggtatttatccgagtgacataaaaacaagttcacacaaaacctgtaaacacatatatgtctttattcatataatagaaaaaacacaaaccctaaaatggaaaaaacataatgtccttcacctggtgatatggtttggttctgtgtccccacccaaatctcatctcaaattgtaatacccacgtgttgaaggaaggacctataaccttcacgtgtcaagggagggaagtgattggatgatgggggcggtttcccccatgctgttcttgtgatggtgcatgaattctcaccagagatgatggttttaaaagtgtttggcagttcttccttcattcacacacactcactgtctctcccctgtgccacataagatgagcttgcttcccttctaccataactgtaagtttctgaagtcctccccagccatgcagaactataagtaaattaaacctcttttctttataaattacctagtctcaggtatgtctttatagcagtgtgaaaataggctaatacatctggtgaatcaataattaaaatgtagcatagctataaatggaatactactcagtaataaaagaataactcgatacatacaataatattgatgaatctcaaatgcattatgggaagtaaaagaagccaggctccacttatgtgacattctggaaaaaggaagactatacggtcagaaaacagatcagtgtttgccaggacttgggggtggggggtggggagtgattgactacaaaagggcatgaagaaattttgaaggggaggtatggaacaggtctgtatcttgactgcagtggagttattgatacttaccaaactgtacaataaaaagtaaatttttattgtatgaaaattatgcctaaattaaaaactattaataaaatcagcattagcaaaatatatgagtttatacacaagagactactcaaccattgggtaaactaattatttttaaacaaataccattgattttaatctttttatagtttttatacaggcagagaaataatagtgattctgctcacctaaaggaagatagacccaattcaaaggtacagaattttccccaaatagtatcataatttttcctttcagattccaaaggatttgcatgtaaattctatcatgtgatcctcagaaccaccctatgagggtaagcagaacagatgatccatgatattccattttataaatgaggtgcaggttaaatatttagccagtatttcttgataagtatagtccatttatttcaacaaaccttgattgagggccccaatacttgttgagcttttgctgagccacccctgctctagaggagcacatgctctggaaatctctaaggaaactactacaactctaaatagatatggtgtatagtgatactgtgactaaatattcactgcaaatttcctctaaaattatagatatacattactggaataattagtatctcaacatcttcattaactatgaatctactatgtatatatcatcaccatgtgagtattaatttggtacaaataggctgccaactctaaaattatttgatgtagggcaagtacttttatctttttagccataaattttctcatctgtaaaatgagaggagtaggcatgtgatcattaaatcctgggttacggtaggaggcatcaatatgaaatgtttagcttaatatagatacagatgggtaaatatagaaatacttaaaaatgcatgtggattcatgtttaatacattagtatacacacatatatttccaagttctgtcctccgaaggcctagaagcaatgacaagcagaagcaaggagcacacccagcatccagttttttgtttctaatactgttctccaacaaagggaaccagagcccttgagaaaaatgcctaattctaggactggggcaggggatatacaagatgagtctgaaacatcttatagtgccagaaaataaacaagtgctttaaaaagacacaaaaaactgatggtatatcaaagtgacataggagccaactaaaagagctcccaatagctaaagctagaataattcaaaaaataagtaattcagcattggatttaacccaaattataaaataagatccatgagttcatactgatacaagtaaatgattgaagaaacaaataattgggagataattctcatattgaaaaattccaaaaaatttatgtactctaccctcgagaagatggaacataattctccaccccataagcatgagtcragcctagtaaatgtttttcaaagagcgcagtatggaaaggaggaagaacactacctcaaccagctgatcaaggctaacatctctagtatgtcattagtggcatgtaaccttgatatgatatgatgagaatagcatttgatctttgatctgtttcctccccgaaactcattgccccagcctaatcatgaagaaatatcagacaatctcaaattaagtacaaaataaccagtactcttcagaactatcaaggccaccaaaaacaaggaaagtataagaaactgtcacagtctagaagagcctggtgatgactaaatgtaatgtgatatcctggatgggatcccaggacagaaaaagaacattaggttaaactaaatcaaacttgagtatgaaacttctttttttttaagtgcctaagtcctgaatgacaacaaaagactgaagaactgacaacgattagaggacactaaggagacttaacaactaaatgcaaaatgggaccctgaatctgatcctggaacacaaaaactaaattagtagaaaagtggtaaaataggtggtcgcgcgcccgaccgccgcagtcccagtcgagccgcgacccttccggctgcccccaccccacctcgccgccatgtgcctccgccgcccagcgctgttcccgggcgtggcgctgcttctcgccgcggcccgcctcgcggctgcctccgacgtgctargactcagggacgacaacttggagagtcgcatctccgacaygggctctgcgggcctcatgctcgtcgagttcttcgcyccctggtgtggayactgcaagagacttgctcctgagtatgaagctgcagctaccagattaaaaggaatagtcccattagcaaaggctgattgcactgccaacactaacacctgtaataaatatggagtcagtggatatccaaccctgaatatrtttagagatggtgaagaagsaggtgcttatgatggacctaggactgctgayggaattgtcagccacctgaagaagcaggcaggcccagcttcagtgcctctcaggactgaggaagaatttaagaaattcattagtgataaagatgcctctatagtaggttttttcgatgattcattcagtgargcwcactccgagttcctaaaagcagccagcaacttgagggataactaccgatttgcacatacgaatgttgagtctctggtgaacgagtatgatgataayggagakggtatcatcttatttcrtccttcacatctcactaacaagttkgaggacaagactgtggcatatacagwgcaaaaaatgaccagtggcaaaattaaaaagtttatccaggaaaacatttttggtatctgccctcacatgacagaagacaataaagatttgatacagggcaaggacttacttattgcttactatgatgtggactatgaaaagaatgctaaaggttccaactactggagaaacagggtartgatggtggcaaagaaattcctggatgctgggcacaaactcaactttgctgtagctagccgcaaaacctttagccatgaactttctgattttggcttggagagcactgctggagagattcctgttgttgctatcagaactgctaaaggagagaagtttgtcatgcaggaggakttctcgcrtgatgggaakgctctggagaggttcctgcaggattactttgatggcaatctgaagagatacctgaagtctgaacctatcccagagagcaatgatgggcctgtgaaggtagtggtagcagagaattttgatgaaatagtgaataatgaaaataaagaygtgctgattgaattttatgccccttggtgtggtcaytgtaagaacctggagcccaagtataaagaacttggcgagaagctcagcaaagaccyraatatcgtcatagccaagatggatgccacagccaatgatgtgccttctccatatgaagtcagagttttcctaccatatacttctctccagccaacaagaagctaaatccaaagaaatatgaaggtggccrtgaattaagtgattttattagctatctacaamgagamgctacaaacccccctgtaattcaagaagaaaaacccaagaagaagaaggcacaggaggatctctaaagcagtaggcaaacaccactttgtaaaaggactcttccaccagagatgggaaaaccactggggaggactaggacccatatgggaattattacgtctcagggccgagaggacagaatggatataatctgaatcctgttaaattttctctaagccatttcttagctgcactgttatggaaataccaggaccagtttatgtttgtggttttgggaaaaattatttgtgttgggggaaatgttgtgggagtcgggttgagttgggggtattttctaatttttttgtgcatttggaacagtgacaataaataagacccctttaaactgtaaaaaaaaaaaaaataggaatgcggtccatggtttacttaatcgtataatatcagtgttcattttcttattttgataattgtcataatgttgtgtgaaatattctctttagggagcctgggaaagaatatataagaactctactgtttttgtaacttttgtggaggactgcaatcatttctaaataaatagtcttaaaaataactaaagtaataaaaataataaagtacatgaggaagtccagtgtcatgttgtatagtcagaagattcttcaaatgagagaatttgcacccagggaaatagagaaaaaagactctgaaaagaactttttttgtttgtttggtttttgtgtttttttttgagacagagtcttgctctgttgccaggctggagttcattggcgcgatctcagctcactgcaacttccacctcccaggttcaagcaattctcctgcctcagcctcctgagtagctgggaccacaggtgtgtgccaccacgcctagtcaatctttgtactttttagtagagatggggtttcgccattccggccaggatggtttcgatctcttgacctcgtgatccacccgccttggcctcccagagtgctgggactacaggcatgagccactgcgtccggcctgaaaagagccttaaaataagtttatttaaaattctcagagaaaggaagatgccagtttgaacacaccccagctccatgccatttctcacccctacccacccaattttcacaagtcagaagctattggtactagcagataatagagtacaataaaggcctaaggatcagtgagcggcctgacagaacagatacaggtccacctctccttttgactaaatcaaactttaccatacatcaaaattatctagagggtcaaatatgcagattgctggtctgtgtacccagagtttctgattctgtaagtctggagtggggcctgaggacttgtgtcaagtacaaggctgatgtttctgcctcaagggccacattttgagaaacgcggcctagacaagggtctagagacgagtattcaagatccccagtaaacggcattgtgcagaaaggagtttgctgactcttagaaccataataatgcttcgccatacctaaaaaataaacaattaaaatcaactaggatgtgtgggaacaagtctctcatacagaattccaaataatttatgtagctattgccccctcaaggaattagagcacaactccatgcttgtgactgctttagcttgcaagtttggcccatgggtgggatttgggaacttggattttgggaggtttcttaccaccttaactgataagagtggctcacttttttaaaactgtttgtacaaacaatgtgatttatgctgaacacttgcttttcttctgggagtctggaattctgatatgtgctaagcagagggtgcctatgtgactagccccaactaaaaacctcatcacagagtgaagatatgtgaaagtctttcgattgtttccattttcttagaggaaaaaaagagaagatgattagctgactgtgaggaaaggagacaacatatttgaggtttgcggagataggttatatgcagtaatcaactagaaaggtgggacagagaattgtctagaaaaatgaagtatgattggcagtagcactgaaggtctacctatgttcagtggttatgaatttcagaaaaggcaagtcaccatactagtatttttctcttgtcatgtttagctgttttgatgcaggcagataaccaaaatgaagtttagctaagcaagtatggaggagagcaacaaagtaattgagagtgcgtggtagggtgtgattataatgttgggccatgcattttaaatgaggtgggctgggaaatgaagacagcaggttgatgggcagcccagtggagtcaaagaactgctggagttggagtaccagagtgaatgaactgaaaaggtaggagagagttttagagagtgggatgcttgaaattgagactttagtggtgttgcggttattcatgacaatgtcttagatatgtccatgtgggtataggtagttgagatgaggcagattataaaatcactggagtaagaagatcacataactaaaaggccagatagcagagtgttagagatctacctcaacattcattctctcttccttcttaataacagaaccttgatttttttcctgaggtattgcctctctgtataaagacacattttgtagtctccctagtagctagataagtaactaagttcttccaataagactaagtgaaaatgttatgtggaacttttgtaaagtctccttaaaagaaaaggggtgtgccattgttacatttctccttccttctgtgtagaatgtccatataatggctatagctacagtgggccatcttggaccatgaagtataaggtccacatgctgaagatagtggagcaaaaagagaagctgaagaactgttatatcatctcaggactatctacttccagacttttttaatataagaggaaaataaacttaaatcttatttaagtcattgttatttgaggtttttctgttaaatgtagctgaagctaatcctgactaagacattggattggtgaaagtattacctacatcagtgttaaaaccaactacaggagtagttttatattatagcgaggcagagagcttggtgctaaaatctttactgaatgaaggggagtcaacaattctgctaataatttcaatcagaagttatgggtgcgtcaaaggagctggggaatttgggaaagcaaggcagaacagcagtgaaatgagggtcaaggatgacatatatataccctaccttctttcttgtaccaagatcttggcttgttatgtcttatgtttgattgaggaaatgaattatagacgaggacatatcacttgtgttttaaaccacaactaaacattaaagataacataccaggccgggcgcggtggctcacacctgtaatcccagcactttgggaggccgaggtgggtggatcatgaggtcaggagatcgagaccatcctggctaacacgataaaaccccgtctctactaaaaatacaaagattagccaggcgtggtggcggacacctgtagtcccagctacatgggatgctgaggcaggagaatggcgtgaagccgggaagcagagcttgcagtgagccgagatggcgtcactgcactccagcctgggcgacagagcgagactctgtctcaaaaaaaaagataacatactgattcagatcaatgactcagaacagtttttggaagaacatgcttgtcctgcagacatttcaaaatgttaatcaccctttaatctcctttgtcactttttctaaaagaattattcactgtttgatttaatcctttaaaagtcatctatttacctcccatattgaatgtattcatttaattaattaattcttaacttactgaggtcttactatgtttcagccactacattaggcactaggaacacacagattaagtacaaaatgtattccttcgaggagtttactagttcaaggaggaaacaggtgagagaaccaaatattgttatatattatgataaggctattcataaaatgtaattgagaagaacactagttgtaatgagagcacagaggaaggtgacctatttgatactgagggtcaggaagatattccctgaagagaaaacagatgacctgaatctggacgatggtataggtgttagccagctgggccagtggagaatttatcaagaggaaagtacagcacaagaatgtgtataaaagcatggaaaaacttggcactcttagaaattccattaggcaatctggaggttgtttaaatgctgtattactcctaacaaaagtaacaggcccagtattaagtaaaataatcttatttatgaatgtacatgacatcaacatatcataaatttgctagtggggtctgctgggttaatgtgcacagcttcaataaagaacatatctaagtgattttaagaagttgtgtattttgactttatatcaccattttacattctctataattatagtctatacttactcagcaaaggaagcaaaactgctgaattaagttacattatgcattattaaagcaacttaatttgtggagaaatcatagaaaaacacagtaatttgaatgacttgtactagccagtattcctcctctgagaaaattctgccagaccatagctctgggtcaaatcctgagccaaaaaataataataataactccacatttctttttatttttaaattttataagagttttagatttaagaaaagttgcaaaaatagtacagcattctcatgtaccccacatccaatttcctttattgttgacattttacattcctctggtacatttgtcacaactaataaaccaatattgatacattattaaccaaaatgcatactttattaatattcccttaatttttacttaaagttctttttctgttgcaggagtccatccaggatactacattacatttagatgttatgtctccttaggcccctttattccgggacaatttctcagactttctttgttgatgatcttgacagttttgaggtagtcaggtatttgtagaatattcttcaacttgggtttgtctgatgtttttctcatggttagactgcattatggtttttgagaggaatacaacagagaggtaaagtggccttctcatcacttcatctcaaaggtacatactatcagtgtgacttattactgttagtgttaatcttgataacctagccgagatagtgtttatcagatttctccactacaaagttattttccccctttccatatgtaatttttggaaggaagtcactattcagctcacactagagaagtaggaagttctgctccatatccttgagggcagagttcataaattatttggaattcttcttcatgggagattcatctattctaccccatttattaatgtattcaattttctggcactacaagaatatatatatatttttgtaatcgactttaaaataattaggaaaatgatagaacattttaatataagaacaagatatggtaaattgatgaatattattagacattatcagtaacaagagctttgtatcttaagttgttttgagttcaatttcttgttcacatcttttagcttggttgagctaaaaaatcattaaccattgatttttttttgtaaccttgcatataatatgtacaatgagagaatcaattaatttagaattacatactcctaatttaaaaaagaaactggtgtacttattgctgataactaggaattatattatcaaagggctgttaattcaacaaatttacatgctaaaagagaaatttatatgttaaaagaaattaaaaggaagcaagagacattcaatttgcttttgatatgcagatttaaaaatactaggtccattttaatagatgataaatctccagtatcacaaggattagggaaagcaaaagacctgaaaagtaataccagttctcagttctctaactctcaaaaggcattccacaggtaaattcggtgaaagggccggcaattgttcaaatgtttaaataagaagaagttgtagttctcacatttccagttctcttacaggtgtgtgtatttggaaagataatactctctaatgttggtcttttccattgttcaggtttatcctgttgttaagtaataagcagcaatccaaatacaaacatattgtacaacagctattaatgaacatcacctgagttcagtgtgcctgacagctgacacttagttaatttctccatgaaacaagaacagtgaaacttccacagatgagaaaacagaatcatcagtggcactgggatgtaaacccaagtacctgctttgcatttcatttgctctgtttttcagaactacactttacgacatgagaaaaactggtataagcagaatgttcctacatttagttaatatcagttctaatttaatacataaatgacttgttcaaatacttacttagactccatgtaagggaggagaaaaggggagaaaattagagtgggggaagatgaatcaaatcacatttgtagaccacactacaacaattggaagctacttatcatatttcctaagataaagttttgttggatcctaatatgggaaggatttaaaagagar

SEQ ID NO: 94282 - DNA, 26217 bp, Homo sapiens
accaatgttgggtttaaattcagtgctttatttttaaaatcttgctctgacagactgcaggacgttgtcatttgcagattttgccacactgcagtcataaaatactttcaacagaatatatttcacatgttcaatcagaaaaataactgttacaatcagttttcataaattaccaagatgacattctttcagtccctttgggaactgttgccaccatgggaccaggaattatttccaaaggagtgacatcgagaaagcaaagaacgactaaaacaataatttctttcactgtaatcaaaattattaacatgtaattaattgtgctacctgaataatcttccaagactttttgtgatagatggcaattagtatcatctccctttttacaaataaagaaactgaggcacagataatttaatttattcaaaaccatgacataaatttgttttagaaagtgatcagatagccatatattggctacataattctacaccactagttttaactaatcaaatctcacataagcaagtggctaatttaaaagactgtaatagacacagtaccacccctcattgctggtgaaatctcaactagtctctttagtctggacgttgtgcaatattattaagtgggttacttccagaatcccaatgtaactttagttcacctcgtagtaacacagacaatctcatggctatgtgttgcagcaaaaacagcaggaatcactataaaaatgtctccacagtcgagcatctgaacttgtcaataacagaattcattatacctcctgacaaaatctgcccctccacttctctcttctttggaaggggggtgaaaataccattcatgcagtcactcagaactaaacgagaaagcatcctagaggccttcttctcccttaatcccaaaactaatcaatagatccagccaatttaatctcccacatacttgccaaatttctcctctcctatccttatttctaccaccactgctctggtgattcagccccatatcttccacctattcattacacgtctcatacctgttctcctggcctccagttatgcccctcctcaaaccatcttccagactgtagagccagatcactcttttgaaagcagttataacaatgctgctcccttattaaaaacccttcaatggtatcttatcatctacacatagtacaaagtccaaactcctaagcatgacccacaaatccttctgtaatctagccccttcctcactctacagtttagtcaacttcttagaccgttttatttctctgtgcattcattcacattgtgctcttaagtggcctcctccactatcatcaaacttccctttacctgtctacctcttactgattataacaacaaatgaggtcttttctggtctcccccaatgtgatcagatgtcccttccgtgtctgcatcataccttttgcatatctctattattacagttaattatattaataattattatatgataattatttgattatgtctatttcccctaatagagtataatttctttgtggtcaaggaatgtgtcttgcccaggcagagtggctcacacctgtaatcccagcactttgggaggctgaggcagaaagatcacttgagcccaggagtttaagaccagcctgggcaacatatggagaacccatctctataaataagtaaataaataaaaattaattgggcatggtggcacacacctgtggtcccagctacttgggaggctgagatgggaggatcacttgagcccaggaggttgaggctgcagtgaaccatgatgacaccactgcactccagcctgggcagtagggtgagacttcgtctcaaaaaaaaaaaaaaagcaatatgtcttattagtctttttatacccaggttctaaaacagtgcctggggccaggcacggtggctcatgcctgtaatcccagaactttgggaggctgaggtgggtggatcacttgaggccaaaagttcgagaccagcctggtcaacatggtgaaaccccatctccacaaaaaatacagaaattagctgggaatgttggcacacactttgtaatcccagctactcaggaggctgacatgagaatcgctggaacctgggaggaagaggttgcagtgagccaagattgcgccactgcactccagcctgggcaacagagtaagactatctcagaaaaaaatataaataaataaataaaagagtgattggaaataatattcaataattgtttaatgaataaatatccctacagtatattaaaactctataaaagcatttgatatcgtttgtggtaacgggtggtagaaactatttatcagggtaatttgattactcaggaaaattgtgacagagatgctggtgccctgagtcactgctcctggacaccaaaattatgcaagtttgtattactcaaatgaattgatatggacacagatatggttacagttccaagaggaaactttatccaatcttcaagaaatattttttgagagacttgtatgagataggccctgttttatgcaccaggaatataagtgaacaaaacagacaaggtcagccaggcacagtggctcatgcctgttatcccaacactttaggaggctgagggaggattgcttgagcccaggagtttgagatgagcctggacaacatagtgaggccttgtctctacaaataaacaaaattagctgggcatggtggtacatgcctgtggtcccagctacttggggggctgaggtgggaggattgcttgggcctgggagtcagaggctacagtgagccatgatcacaccactgcagttcagtgtgggcaacagggcgacagagtaagagcctgtctcaagaaaaccccccaaaaaacagataaggtccctgccctcatgacactattattttaatgggaagagataattaataatcaataagcggtagttttagatgatgataatcactaccgaagaataaagcccagtgcagggcttactttacattggatgatcagagaaggcttcattcagaagggaatatttgaggtgaaacctgaaataacatggagtcacttatgtaaaaatcaggaggaagagggttccacgtgagcacattagcccaaaggtggaaatgagcatggcaaaatcaagccatcaaacacggacaggttggctggcatagtaggtgagaaggagaatagtatgagaagaggagagaaaggtaggggccagattatgtagggtgtactgggccacataaaagtgtctgaattttacttttaagtgaagtaggaagtcattagaggatcttaagtggagaaagtatatgctatgattcgtcttcaaagttcactctcccagttctgtgaggaaatggatcacagcaggtgggcaaaagtggaaacagggagatcatttaggaagctactgcattgaactgacaaaaaaaaaatgctgacttggaaaaaatgtttcctttcatgagggttaattagaataatgtaaattaactgctacattcagtgtctgatatataaacactcaacaatatattatactattattattagtttatacctacagaaaactcttcttattcaacacgatatgaacatcaaaacccttgagacagtaacttgggaggtatacaatgaccatacactcaaggtttaagaagtagaactctattatttatttaacaaaatgtgttgaggatctacactgtgcaaattataaactggtttgctgagccagcatagggaaactggattaatatatcaggcatcatagaatactagatctggaagggatctagaagagttcagcccctcactttacgacaaaagagcagcccagagaaagaaactgtggttctccctaaactaaaaactgagaggctcataccttaggttgccccaaggacacactctgaataactaaagattttcattaacaatataaaaccacaaattttaaataaaatgctatcttagcagtaatgtgctacactaagaaaaatgtaatatgtatataaagccctggatacagtgctttgtacggggtgaacactcaataaatggtaactactactttcagcagctaaaaaaaaagtctgtatggtctttggaaggctgagagtgtgtggtctacctgacatcaactacttgacttgagagtagagccacaggaattttaatctaattcaattctttgattttccagatggaaaaaatgaggtctaaaggggctagattcaggcgttcaaggctgcggtgagctattatcatgctagtgcactacagcctgggtgacagagcaagacattttctctaataaaaaaaaaataaataataataataaagggactaaatgacttgcaaagccacccacagtgaattagagacagagacagagccaaagccaaacccacatgtagtgggtttccactacatgtcacagctataaggtagtgtttcaaacttttataaaagggtaacaagaacatagctgctgtactgaactttttcactccttttattaaggccaccagtgagctatgaatttgatataaggagcaatcacaccaacaatcaggctgtgaatatataatccatgagttaacaacgaaacagtcttaggaacgcaattctatcatagacacctgatgaatagatggagttcacctgagcagctgttatatgcacttcaatagagagactacaaagcctctctacttgtagaatacaagtacaaagaagatgctttaaaacattttccaaagcacacttaaaatgtgacaatagctgccggtcactaagaagctaaagggagataaattatcttggcatacagcaacagaatggtttattttaagcaaagactaaaaggagtctaataaaattattgggagaccaaggctaaaagccacagatgcaggaagagttgcagcaaccaatccaaaaaagtttagcctttcacaaagagtagaaaggccagctgtggactgtgtgtggacttttaggtccttttgcattgaagattagggtggcctccccctagcctcgaaataaaaaatcgtctctgaagcagagagacaacaaggcagggcatgaagaggaatccaatctatttcttgtaaattaaattcaactcaacaaatatttcctgaaaatctactatgtgcaagacattgtgaacgatgcttgccttacctcaaaggcttcaaaattttatgggaaaagggaagcgaacgggcttcccggaagtaaacaacccaagggcgaatagaaatgccctaaaagaggtgccggtcaggcttatcggttcaaaagcaagaaggctttgggactcaagagtttagtctcccaaagtgagagaagtggcgttcaagataattgctgaagaaaaggcagagatatggggatgaaagataggaaagtaggtgaactttaggaagagccaagaggggccaactctcggttccctcacaactgccagtttcctcccgcgctcagccgacgtcacgcgcacccgtgtccgcgggyaggcgccacggttccggaccagacctacccctcctctattctccccgccctttctcacctcggtccaaactcctcggtctgccctgtctgagaagaggagaagacaatgccgtcgggagtgagccccaaagcccgcaacctaacagtcccgtcaacccgggagccaccggcggcggccaggccgcatctccatggcaacgccgccaagcgccagttcgaacgcccgcgctgtggcccgcgcgtcgccagtcccgcaccgcccaccaatgggcatccaaggaatcggttgacgttcgttgacttctcctctggaagaccaatcagaggtctgaagaaaccgtgggcgtaactctcaatttccgaccttcagccaatcgttccgcttgagggaagatctcgcgacgtttcagtgtgagacgcgcacctttgaggcgggtcgaagatccttctgccgaattctattgatgggcccaagcgtaaccaggctcttctgattggccggtgtacttcagtttccgtccaaggtccgcctcctacctccttctgcttcgggtgagtacccttaagggcccacttgattttagttctcagtggaggaaatgagccttggagcgatgggaatctgcctctggcaaacctctggtcgctgcagggccsgagagggatgcgccctcctctaagttggcagtgaggtgtgggcaggccaggtcccatccgctctcaggacctcagttttcctgtctgcaccgggagaagggaggttccctgactctgagccttgcttgtccccgtcsgagtggggatagggtgggtcgtccaaatcccagaggcgggagaggtccaggtttagggcccagaggcccaggcgccgaaccttcccctccctgggcctcagtttcacttgttgctacccattaaaccccgcctgctttccaaaagagattttatgttttctaattgcttcagttattgaatggataatatcgtggcagttatagcagaagtaaagaaagtcgaacaagagccccaccgccttaaacaaacaaacaaaaaagggacagcgtaaacaatgcaggccgggtgcggtggctcacgcctgtaatcccagcattttgggaggccaaggcgggcggatcacgaggtcaggagatcgagaccatcctggctaacacggtgaaaccccgtctctactaaacaaaatacaaaagttagccaggcgtcgtggcgggcacgtatagtccctgctactcgggaggctgaggcaggagaatggcatgaacccaggaggcggagcttgcagtgagcggaggtcgcgccactgcactccagcctgggcgacagagcgagactccgtctcaaaaacaaaacaaaacaaaaaaaaactgaatgcaatcaaattgtcaaatgtaaaacgctattatagagttaaggttaagatcattgatgttaggagtcaggcagacctacatttgagtcacttacccagacatctctgagctatagttccctttctactcttctgaaaaatggcagtaatgcctcagcgggttgttgtgaagattaagtgaaataatgaaggtaaagcacttgacacaacgcctggcgagtagtaacttcttaaaaaatggtagcggccgggcgcggtggctcacgcctgtaatcctagccctttgggaggccgaggcgggcggatcacgaggtcaggagatcgagaccatcctggctgacacggtgaaaccccgtctctactaaaaacacaaaaaattagccgggcgtggtggcgggcgcctgtggtcccagctactcgggaggctgaggcaggagaatggcacgaacccgggaggcggagtttgcagagagcagagatcgcaccactgcactccagcctgggcgacagagggagactccgtctcaaaaaaaaaaaggtagctattattcttataataagaacaggcaaatacactagtcagtgcgttggtgtactttttgtaactgagtacccaattttgcccaaaattagtcagttaagggaaaaaaggtaattcttactaataaggaaacaaatccattcttcaaaagataaattatttttctagtttctatattaaaaggaatttatgctgtgggaccttataaggaatatatatactgtggtgaacagtgttgagcagtttaacagacaagatgaaaagtcatttctttaaaacagagaagctttttgatgatcttttatgacacacgggtaacagtaactcatatatttagtacctctgataatgtcagaccctctatatatgtcatttataaactccacaacaaccatgcaaagtaggtgttaacttcattttacaaatgaggaagttaagtatcttgctctaagtatcttgctctattaacttcaatagctaggcctttctgactgcatagacagccatgcttttctgtgtttctgactaaaggaggatgaaaatgcttggaataccagacagatgcaggggcaggttggacagcttgacttacctaaattggagggaatgtgagctgcagaggtacctatggtaggagcaatatcttgctctaatagaaaattttcaccgtggtcttggtagagaagggaggagaaaaaaattgttttaataaaaataattttaaaaaagtaaattcccaccttgggaaatgaagagataggatgagatgatcactgaactttagacccatctgttcatttatcttatggatagactatagcacttcaaattcaacttgtcccaaacaaatgcttcacttgcaccccctcctccacccaggcactcaaaccaaagcctttctctttcccttggcttatgaaacatctctctgtcccttagacaatgaaatatcactattgtccattttactttgaaatatctctcagattcatcccttcctttcctttctcacagcctctgccttgatctaactggaatcatttgttaactggtctgttgcaatagacttgtaactggttaatctctctgcctccaatctgtcctaattcgttccccagcttgcttgcagctagaatatctttgtaaaatgtcagtctgaccaaattatacccttgcctaaaaccagtcagaggcttcattgcctacagaatataaactaagctgtttaccaatgagatgtcattttgtgcttgagggtgttgcccacactcctccctttgctggcagtgccttgcatccgcctcccttctgcctggtaaactagtgacccatcagaatccttatggggtaccttgttaacctaaagatgcttctttgctgcctttccatcttacgttgcacaaaacacmctgtaacttgtctgttggaatgtcttccactttcactagcctgtaaatctctaggaagttggtgcttggtagtattcagcttcatatctatctgtcaatccttcacactgtctgtcgcatgggatacgcacaacagacaaattccccgagttagctttctagaattgtacagcagatggcactaataggctgcttaacaaatccccttcactaagaatgatttttgtcccaaccttgtctgactttggccttatcctagaagccaatatttatgccattacaggtaaaatctcctgtttcctccctcagccaatagcaaaaataacaaaatgactcagcagcttcgtctctgcaagaatggagtggcagatgtccagggaaaggtgcatttgagggaatattttctttgtctcaatttattcatggtagttggggcttttcttttgcatttctttcttttttcttctcttccatttgttattgttcttacaagaaagagctttactcatgggtgggtgcctcatttctgtccactccaaaagggaagaaagaaactggcaaattggaaaaaagatgatgatgatgtgggaggtgagggagtagtcacatagaattgcagtcacatagaattgcttgtgggcaggcaaacagttggctttcctcctcatctggaggagggtctgggcaaattttctggacactagtgccctaagttaagtggaacatgtggttttaggttcctacttcccagaaaagagcagaggaggcatagaaacccttttgagatgggtgctattaggagcctgaggctacattttacccctccttcagagtcttcttcggataccaggatttaacatctacggccctctccccccaactaaaacctttttggtggaaatgatcccagctagacatcttaacctccaaaggaatatagattaaagactgggaatttggggccaggcacagtagattgcacctgtaatcccagcactttgggaggccaaagtgggaaggtcacttaaggccaggagttcaagactagcttggtcagcatagcaagaccccatctctacaaaaaaagtgttttttaaatttagccagatgtgatggctcctgcttgtagtcctagctacccaggaggctaagacaggaaaattccttgagcccagaagggatgcagtgagctcttgaggctgcagtgagctgtgatcataccattgccctccagtctggatgacacagagagacattgtcaaaaaaaaaaaaaaaaaaaaaaaaaaaaggactgggaattttgaaactggaaatgattttataaatcttgtctgtcctctctcagggccatttgtgtcctaagccctactctttcatggtgaacagagctatgaaagggacaaaaattatagactttggagttagacttacttggattgaaatcccatcctttacaggccagctatgcccttrtgcaagtattttaaccttttgaaataatatcagtgtccttgtaaattagatataataatgcttctcttgaaaggttgttttgagctttagaaacaatagttgtcaaaagtcttgcacagtatagctggcacagtatatatagatgcttaattgacaacgyggcatgaaacactgtttctgctaaagggatattagaatatggagaacaggtcagagggaaaatttggagagctcttcctgtacctaaagttacatttctgagggctttttacagttactctgattaatttgatgaaaatattgaaacaaacagcatagccatgtatttgtaaattctttttttggtacctaggtcccgaacctcctaggctctgagggaattgtatttatggagaaagccgagaatatttttccttagcttctagaaccttctaatgacattgaaggtttttttgttcaggttttttctaaccacctcaggcactctgccacttttttgaagtgtgaattgcctgctgtcagcctggagttctcacctccgcaatcctggctgcaggcatatttgcatattggatgctgtgttccttaaccccctgaggtttgaatccacttggagtctgtgtgtgaaagctggctactttcaaacccatgaacagtttcagctttgtggtctccagaaaaacagaaaacccccaacaatagttccattcacttttatgtaaatggcactcttcaggaaaacactgggctatttcccagggccccagaacatactcaaacatttgtttgagtgggaggtggggagagagttcttttgagtcaatgaacatctgttcagaactgctgtgctgggtcscaagaaaacagagcttataatctgtctcttccctgccagaggtaccagcagagatttactatactaggtatatgtgcttgtrgtggcattgtactgtgtcagtttagctaagctggattcccagtatccttcctatctgcttccaggtgagggttgtccacaagaaaatttcgtgagagatttggaaagctgaattgaagtagcagccagtacactgtgaaggacagagcagggtctgtacgctgtgaaggacagagcagggtaccaggcatagtggcagtacctgtactttctctctgatctggctcaccttgtyggtgaaggtcatcacacagcccccagcacccctagctcctactgaatttcctccttcagctcctctgagtcctgggccatgtgtgcagtcagctctgtagcagagggctccggcttctccagatcacctgagtcactgagcttgggaccagtgaaaggaagttgtgggtttcagtttgtcctcatgagttccagttgtccttgtagatcccagtttgttctcagaggttccagtttgtctttgttctcttccacctcacatccagttttcttcccaactgctggcctcacagacttcgggcccaacaccaggtgcagaggcagcagagttgcatggatttatccaccaacttccaaagatacacagtgtctactccttataataaatctttagttttctgtcactcatagcgtttgcttccctgattgaactttaaatttgttcaagccgtgttaaggatgcagagcatggaagtgattagaagccagaaagcttcacagaggaggtgacatctgagctgcttctgacgagtaggaggttgtgtgtatagagtgggtaggaggaattctagagaatagctggctcaagccaagcaattgaaagagcagtgaggagttctgtatttctagaagaactgttctttccatgggtccagaatatagatggagaatgagcatctgatcctagctcttctggcgccattgagattaactgttagctgatgtggttcttagatgtggtcatccctaatacactggcatccactgaaatacattcttgctagggtacacccttgtcactaccctaagattcctcccccaccccaccgctgctttcctctccccagtggttccatgtggctaacccaggcttgtctttcttggctccccatgcaggcatctttgcttgtccatgttgtgttgatggtggcagtggtatggagttcctgtcttaggcagggcactgtgccctctagtcttggatccctaagcttatttaggggttctaacattgattccatgggaccttctagtcttggatccctaagcttatttaggggttctaacattcattccatgggaccctctagtcttggatccctaagcttatttaggggttctaacattccatgggacctgaggcaggagcaaggtaccccacatctataactttctaatgctttttgagcatctttatagggagggcatgggatcagctacctgtttctgcctcaaccayggaccaataatatgagatctttgttcaccagttctacagtgatggggtgcttccttttggcttctggaatggggtaagttcttgacataaatagggagtccaggaaaatagaacaatgaaatagaatagaaaaatgaaagcctaccactttatatatgaatttgtaaactcaaacagggatttcattatacatgctattcagaactgtctccttttcatgtgtctaaaaatttttcttacaagcagtacattaggcttgacctaatttttttttctttttcttttgtttttgagacaaggtctcactgtattgcccaggctggagtgcattggtgcaaacatggctcactgtagcctcaaccttccaggctcaagcaatcttcccacgttggcctcccaagtagctggaagtacaggtgcatgccaccatacctggctaattttttttctattttttgagagacaaggtctcactgtgttgtccggactggtctcaaactcctgggctcaggcaatcctcctgcctcagcctcccagaatgctgggattaaaggctcgagccactgaacccagcctcgacctcattttttttaatgacttcatgctatttcatcatatagatatactgtactttttgcytattcccatattgatggatatttgtttctggctcttttcctttttgatattgcaaacaaagttgtagtgaacattgttatatgtacatcttttttttttttttttttttgagacagagtttcgctcttgttgcccaggctggaattcagtggccccgtctcggctcaccacaacctccacctcccgggttcaagtgattcttctgcctcagcctcccaagtagctgggattacaggcgtgtgccatcacgcctggataatttttgtatttttagtagagacggggtttctccatgttagtcaggctggtcttgaactcctgacctcaggtgatctacccgccttggcctcccaaagtgctgggattacaggcatgagccactgtgcccggcccgttgtgtgtacatcttaaacctatatttcttatgtgagagtggctagaaatggaattgctggctcttagggaatgtgcattttatgttttgataattattatcaaatggccctcctaaggggatatgctaatttacttttctaccaacagtatatgagagcacagaccatttcagaaatcccctttgagattatttccagtccttaaaaacttttgttacaggtttagaaaagcttggaaaggtcttggtgttgggtgtttggtttttggtgagaaaccgctattctctagagtaacattaccatctgttggcagtcttgagaattgccctggagtaggtttctgtttgggcctgatttttatgcctttgatagctgcaaattcatcttgattgagcaccagcaaagggactgtggaggatagcagctcctgctccagctgccctctctgcatcagctgtgcaacccccgggcaccagcaatgtcaggcaatggtggcatgtgcctgtattgccagctgctcaggaggctaaggggggaggaccacttctttttttgagacagagtctcactctgtcgccaagctggagtgcagtggcccgatctcggctcaccacaaccgtaacctccgcctcccgggttcaagcgattctcctgcctcagcctcccgagtagctgggattacaggtgtgtgccaccacacccggctaatttttgtatttttagtagagacagggtttcaccatgttggccaggatggtctcaatctcttgacctcgtgatccacccagggagaggaccacttctgtttgggagtttgaggccagtctaggcaacatagtaagtccctgtttcttaaaaaaaaaaaaaaaaaaaaaaaaaaggataaaataaaagactaaaaaaaatcagactgggcatggtggctcatgtctataatcccaacacattgggaggctgaggtaggtggatcacttcagcccagaagttcaggatcagcctgggcaatatagtgagaccctgtctctaaaaaaaaaaaaaaaaaaaaaaaaaaaaaattggccaggcatggtggtggcatgcctgtagtcccagctacttgagaggttgaggtgggaggtttgcttgagcctgggaggtcaaggctgcagtgagccatgatcacaccattgcactccagcctggtcaacagtgctagaccctgtctcaaaaaaaaaaaaaaactcaacgaaatatttttttctatatgaagttactctctgtagatgacctctctgcattgtcaraaaccacactgctggggggttctgtgcttcaggggctcaggatatgggctgggggaaatggggttacaggtttgacgataaaacttgtactgcctctctcccattcccaacatctctcttgtttcagtgcgtttgcttctgaggatctccagtgtcacaacaaacacatgccagccctgttttacagggagccctggaggagttgggatagaggccacattgactgagggyagttgccagggtcctgcagttatacacaaaggtcagtctctgattcctggatgccttccattggtcctgggcatgctgsctttttctgtgggctatgagatcacagttagctagtctgcattactgtccatcaccagattgctaccccccagtatggagcttcctattttgtgtaacttcccaatattctgtatcttctttgttaagtccttaggataagaccatggccttgagagcatgtggcttgatcatcttccgaagatgcctcattcccaaagtggacaacaatgcaattgagtttttactgctgcaggcatcagatggcattcatcactggactcctcccaaaggtagaggccagaggggccagctcttgggaaactgccaaccactgctcagaaatctaccctgccaggccctccccaaggcttaattcccagtgactgtgtagcaaaaaggggtagggaaggtaggagctcttgaccctttctacatacaaggtctccagaccaggccagagtagagctgagaattctgtgactgaattccagggtagaaacagcacctggtgtttttatgagtatcattcgccagctctccaacctctgtggtgaatggctgggtaagagaaaaaacagtgggcagggaattggggaccttgaggttgactgagctatgtgcccacctctcagctttgagtttttcatctgtcaaacaagggcttgactagaaaatcctgttttcagccaggcacagtggcacacgcctataatcccagcacttttggaggtcgaggtgggcagattgcttgagcccaggagctcgagaccagcctgggcaaaatggcaaaaccatgtctctacaaaaaatacaaaaattagccaggtgtggtggtgcacacctgtagtcccagctactcaggaggctgaggttagagaataacttgagctcgagagatcaaagctgcagtgagccgagattgtgccacagcactccagcctggacaacagagcctgtctcaaaaaaaagaaaatcctaagttttcttccagcctgtctctgatttcatttgatcaatttcctttgactcctagttcagtgtccctatcattaggtttttcttttctttttttttttgagacaaagtctcgctttgtcgcccaggctggagagcagtggggcaatctcagctcactgcaacctccatctcccaggttcaagcaattctcctgcttcagcctcctgagtagctgggattacaggcgcccaccaccacgcctggctaattttttgtatttttagtagagacrgggtttcaccatgttggccaggctggtgtcaaactcctgacctcaggtgatctgcccgtctgagcctcccaaagtgctgggattacaggcgtgagccaccgcacccagccaggtttttcttttgaactaaacacagagagtatgagttctacagtgtttctgaacatagttgtattttgagttggagcatagagaagttgggctccctgatcatagattcatctgcagattgtggcaggagtggaggagtgaggagatgggcagggccttcttagaccaggaggggatgggcagggccttcttagactgtaaagattatggagaccttgagattgcagcttgaccagctagctacctgtgccttgagtctatcactcagcactgagggtggagtcggccaagtctccagagggaagaacagtgaagactactggcctgaggccttaggccaggccaagatctgtttgtaagctggccagttttcatccaccagcactcctgacctcacctctaagagtaagaaagctgcagtcatttggtcctgaaagagaagccaggctgtgtggggagaaatgggaaaaaggagcccttcttggctgaggccattgggatggtttgagttgggagggacagactgtggctcaggtgcctgctggaatgaggaatagccctcagacagaaggaagcagggactttattttttaaattattttgttattattattactattttatagagacagggtcttactatattgcccaggctggtcttgaactcctgggctcaagtgatctgcccacttggtctcccaaagtgctgggattataggcatgagccaccacgcctggccagaagcggggactttaaaagggagtggggttagaagggatggacaaagatccaggattgaaggaaaacaaggaaatgggaacaggaaataaattttgcatgtttgagttgtactggggagaaacaaggtgaaaaaagaggcagaagcttcacaaatactatgaataggaatattcacacttgtctccggatcacatgagtcacactgccttgttcctctcactacctgatgtcagtggacctctcctaatcctttcctgcttcggcagaagctaccctgttaattaacactgatggacagaatactgaatagatgcccctgggaggggtgtgctcagggacttccatacacctctgaggggaggtaggacgtcctgagtcagtatcacccatcactactagcatccctcccaccttgctcccctgatgcattacctgtctgtctttgtgtacaccactataggaggtgcttgtgcagagaaaattccccagaagctataagctagaatggtttttaagtgctaagtttctgggggttttgtttgtttgtttgagacggagtctcgctctgttgcccaaactggagtacaatggcacaatcttggctcgctgcaacctccgcctcctgggctcaagtgattctcctgcctcagcctcccgagtagctgggattacagatgtccactgccacgcccagctcatttttgtatttttagtagagacagggtttcaccatgttggccaggctggtctcaaactcctgacctcagatgatccacccgcctcggcctcccagagtgttgggattacaggcatgagccaccgcccctggaccctggggagttttttgtgcagcagctggctctgggcattgtagacccctgggaaggatgagggcccccatctccaaaccaaggagagaacaactgagttcctgctcgccatgagcctgtgagcaggaggcctccctagaaacttactggagccaaggtgtagacagagtctgccagaccgttcccagtctttgccccctctggggaagctgaagatttgtgggaggggactagaggtaaagctgagagctgctccagtctgcagagcttcaagttctcctacagcagtttcttggcagctgtcttcttgggtttgggtgttgctaacacattttcttagaagtggttctcagctggcccttagtctaagttcccatcaagagtttccctatgaaactgaaatctggctttgcccagtaagaaagaggaaaacaatttggaaaaagccttgatagcttcatggaaacagctgctcattcagccgtgcagggttttgagcctgttggccctggaatgtcagggtccacctgcagacaatgttaagtcctcactggattgtaggcaaagtacttcctcgtcagctaacttccacttgttaagaaaggacttccccctccttggaaaaatcacttcaaggtctccaatagaaaagtgattccttagagcatgggatgaagaaagttccgaagaataagaaagcagacgtctgaagaaggtcatctcacaccataaaagagcagtattctaaacctgacttgctatacacatggtctgtttcactctctgcagagaagagggaatggaaaggtgggattgctcaaaccccgagaactagacactacctgccytgcacccccttcccaggcatgttaggatattgccaatctccaggcttcctttagcaacacctagaaaagtcactgaatggctgggtgtggtggctcatacctgtaatcccaacactttgggaggctgaggcaggaggatgacttgaggccaggagtttgagaccagcctgggaaatatagtgagaccccatctttaccaaataaataaataaataaataaatagctgggcatggtggcacatgcctgttgttctgaatactcaggaggctaaggtgggaggatcacttgagcccaggaattcaaggctgcggtgagctgattgcactactgcactctggcctgggcaacagagtgagtccctgtctcaaagcaaaacagaaaaaaaaaaaaatcttgtctggaaaatccagctttgggaactttggaagatttcctcctccttttcttcctcttttctcctaactaggccatgtggaaccaggagaggatgacttggaaacagccctgagggagacccaagaggaagcaggcatagaagcaggccagctgaccattattgaggggttcaaaagggaactcaattatgtggccaggaacaagcctaaaacagtcatttactggctggcggaggtgaaggactatgacgtggagatccgcctctcccatgagcaccaagcctaccgctggctggggctggaggaggcctgccagttggctcagttcaaggagatgaaggcagcgctccaagaaggacaccagtttctttgctccatagaggcctgagctgactggagcagagtcatttgcttcagcaggatccttgtgggccttctaagatgaagccaccctcaggtccagggaaggttgtgctggtatttggctcatgacagccaagagcagatttgtgaaatcggctcaactcccaggtgagagcaagcaaaaatcttggctgggtggaaaggaaggcaaaagagtaaaaattaaaaaggccaggcccagtaagtgtaccttgtactttataaataaacctcaagcagctcaaggttgtccttctaacctgttgtgtttatttcttggactcttggcattggtggagagaagaaagctgaagtgaatcagagttctgaccttaaccagagggaactctgtgtccatacagtatccccagagaacttaagagctagggatccaaatggaagagacccagcactggcaggatggctctctcgcctctggaatgccaagcacacccaccccacccccaccaggggccctgagactttgtgacccatagtcaggatttccaagtgagtgggactggagtgcaggaattgggtctgtcctactcactaatatatctttcaccagcagcaggcacatatgttgtaagtactcagtaaatattaccttaaatagggccaggcacggtggctcacacctgtaatcccagcacttgaggcctaggtgagcagatcacttgaggtcaagagtttgagaccagcatgggcaacatggtgaaaccctgtctctactaaaaatacaaaaattacctgggggtggtggcacacacctgtaattccagctactcgagaggctgaggcaagagaatcacttgaacctggaaaatgaaggttgccgtgagctgggatcgtgccactgcactccagcctgggcgacaaagcgagactgtctcaaaaaatgaaagtattaccttaaataattagagactggctaggcgtggtggctcatgcctataatctcagcagtttgagaggctgaggtgggtggataactgaggtcaggagtttaagaccattatggccaacatggtgaaaccccatctctactaaaaacacaaacattagctgggcatggtggtgcacacctgtaatcccagcttcttgggaggctgaggcagcagaattgcttgaacctgggaggtggaggttgtggtgagctgagatggtgccattgcactccagcctaggcaagagtgagactgtctcaaaaataaataaataggctgggcgcagtggctcacgcctgtaatcccagcactttgggaggccaaggcaggtggatcacctgaagtcaggacctcaagaccagcctggccaacatggtgaaaccccgtctctattaaaaatgcaaaaattagcaaaaatgcaaaaatggtggctcatgcctgtagtcccaactactcaggaggctgaggcagaagaatcacttgaacccgggaggcagaggtttcagtgagctgagatcacaccactgcactccagcctgggcaacagagcaagactccacttcaaataaataaataaatagagacagaaagaattttagactccccaagtcacaacagagagaggagggacaggcaaccctggacccccaggtcagtgacacgtgtactctgtcctctcagaccaggcctgcctcccagagtgataagccttgttaacatgactaaggtcactgggaatgaggcaagcccagacccaaaggaatctgctgggccacccagcagtcacatcattacacctgtgcattcctcacctgcagctgccttccccaccctcagcaaaacctcatcattaatgtttctctcttcctatctacttttttttttttttttttttgagacagagtttcgctcttgttgcccaggctggagtgcaatggcaccatctcggctcaccgcaacctctgcctcccaggttcaagtgattctcctgcctcaacctcccgagtagctgggattataggcatgtgcccccaacatgcccagctagttttgtatttttactaggaacaggatttctccatgttggtcaggctagtctcaaactcccgacctcaggtgatctgcctgcctcggcctcccaaagtgctgggattacaggcatgagccaccacgcccagccttcctatctactctttttgtccacaactccactgtaagactcagaggtgcaagagctgggtctcagccctgttttcctttgctactagggctcaaggaatgcaggagcaggtgttagatcccacagcccttccaggagctgttagcagctggattcatgtggattttattagaaagttgttgcccaatgaagtgcagaarattggaagtgaaggggcattggcagaggtcagcctggattaccagggtcaagaacagccacccccaaaggaagaaaagacaactcgcccaggtcttaagcagacttccagatgtttttagtccccagttctccatgcagacagggcaaaagtactagtgaacaggatcttggagcacagccaggggcctgaatggttttgttcctcaccctctgagcagcattctctgaaggaggcctgctgcatgaagtttttggagcttaatgttctttttccaggccagcagggaccatatcacactgatttaataaatgcctgctgggcagtagtgccaaaccacagacgagctgcctcctaacaagggctggccagctccgcactctcagaatgggaggctgtggaatctcaagtctaagacctcatacatcaaagttggaagggacctggaaaatgacctgatttggctgctcatttttattgctggggaaattgagacttaacaagatagatggccctggcagtatctatagatggggtgctttgaagagggggtgccagagggaagactgctttagaatatatatatatatatatatatatatatatatatatatatatatatatatatatatatgtatgtatgtatatatagctttggagtcattcctctgggccttacagagtgttccattaaaatgtaggtactttggtgaagaggtccctcataagttgtattttttttttttttttttttttttttttgagaaggagtctcactctgtcgcccaggctggaatgcagtggcacgatctcggctcactgcaatctccacctcccaggttcacgccattctcctgcctcagcctcctgagtagctgggactacaggcacccgccaccatgcccagctaatttttttttttttttgtatttttagtagagatggggtttcaccgtgttagccaggatggtctcaatctcctgacctcgtgatccacccacctcggcctcccaaagtgctgggattgcaggtgtgagccaccgcgcccggctgtaagttgtattctttgcaggaataactgacagtagggtgggactaaagcatgttatgggaggtggatgagggtgggagagagaggagctgagattaggatgtggcaggtgagtaggctttgacaacatcaccactttgcttttggccagtggggcttgggcaacctgaactcagaccccagagcgttacaaaatccagctcccgtgccccaccacacccctctcaactggcagagcagcactctgccgatgctgcactttgggttaggccaggcctcagggagacctcagcagagttgtaccagttcaggagatgcttccatgttgaagttttcctccagagaatggggctggtcagaactaatctaaaattggaggagagccctgccccagcccctctgagggagagctctcccctgggacctcagccagtttaccagctctttggctgtcagagtcccagagttctagagtccagtctttcccaagttctttcgttgttggttttttttttttttttttcccgagagatggagtttcactctgttgcccaagctggagtgcaatggcgcggtctcagctcactgcaatctccacctcccgggttcaatcaattctcctgcctcagcccccaccgagtagctgggattacaggcactcaccaccgtgcccagctaatttgtgtattttttagtagaggcggggtttcaccatgttggccaggctggttttgaacccctgacctcaggtgacccgcccgtcttggcctcccaaagtgctggcccaggttcttttttttggtgggaggacagagtctctctctgttccccaggctggagtgcagtagtgcaatctcagctcactgcaagctccgcctcccatggcccaggttctttatgtagagtttcagtggattaagtgagcagggcaagcaaagagattgctgatgtggtcgtctttacactccacaggagtttccctggggaataagcttagggaatggggagctagaagagcatcttgctccatcatggggttggctccagagtgtagcctgttgcttctttttacagggatcagaagaaagatgaccaaggttgggcatgtggcattggctcacacctgtaatcccagcactttgggaggcagaggcaggaggatcacttgagcccaggagttagagaccagcctgggcaatgtagtgagactccatctctaacaacaacaacaaaaaattagccaggcatggtggtgtgtacctgtagacccagctactcaggagactgaggaggggagaattgcttaagcccaggagggtgaggctgcagtgaaccaagattgtgccactgcactccagcctgggtgctagagtgagacccttatctcaaaattaattaattttttttttttttttgagacggagtcttgctctgtcacctaggctggagcggagtggcgcaacctcaactcactgcagcctctgcctcccgggttcaagtgattcttctgcctcagcctcctgagtagctgggtctacaggtacacaccaccacacccagctaatttttttttgtatttttagtagagacagggtttcaccatgttaaccaggatggcctcgatcacctgacctcgtgatgtgatctgcccgcctcggcctcccaaaatgctgggattataggcgtgagccaccgtgcccaaccaattaatgtttaaaaaaaaggaagaagaagaaaaatgaccagttcttcccaagttctccatagagggtgacttagggaaggagcctaggcagaaccacagtttggagaggagaagcctctggcttgagatacctttgtttaaacatttatgtcatcacttttgtggctcctaaagtcctgcctccttcaaatagctttcccaggctactcagaaatttctggtttccgtttccctaatggctacttcctctctctcaaaactcatctggcaccttaggaagttgcttcattaaaaaaaaaaaaatctgtatccagtatgaccattgctcctttagctcaggggtcccctcccacccaccctctcaagatgaccagtgttggctgggcacagtggcttacgcctgtaatcccagcactttgggagaccgagttgggtggatcaccagaggtcgggagttcgagaccagcctggccaacatggtgaaaccccgtctctactaaaaaatacaaaatattagctgggagtggtggtgggcacctctaatcccagctactcaggcagctaaggcaggagaatcgcttgaacccaggagatggaggttgcagtgagccgagattgtgccactacactccagcctgggcaacagagcgagactttgcctcaaaaaacaacaacaacaacaacaacaacaacaaaaaacaaaaaaaagaattaccagtgtcgttggccctccaaccctaggccttttcctccctgcctatctcatgtgcactgtgtctcagacactctcaaagatcatcattctcagacacacatgctgaggcaaaaggcacagggctgagagaagccatgtggagtgatggtctggtgtttatctctggctttgtcactacctggatacgtgatcttgggcaagctctgaacctctctggacattattttcctcattacaacaagggagttggacaagatgatctcaatggtttcttccagatctgacaacctgtaggattgggtttgaattttgactcctcagattactgtgtaaagatcaaagctccgaaagacgcttcctctgtttgattattctgtttttctaagacactctagttttctaatttgaagttcaaagtgctaagtgtaaagttattcagtaagtattgcttagactagta

SEQ ID NO: 94283 - DNA, 54123 bp, Homo sapiens
tatgtttttaatcaaccaacaaatatttgagtacctagataccttattgtggaggataccaagaagtgcaattgatggtttcagttctcaaggaactagcaaccaagttgggagaaaatattgagtatacataaaagttaattaacaatctcaggcaatagaatgataccaaatgaggagaagagacataaagtcttctaggcaggaatctttttgggctacagtgatagaaatattcattaggtacttaaatggctttcaaaccattttaatacatattttctaaattgacccttttaataaatctaggaggtattatctccatttaacagatgaaataaaagctcagagactgtaatttgcccaacttcacatggcagagctgggaactagactcaacgtctttcagtgcttattcctagtgggatttatctaaattggcattgaagatttgctgccaaaagagttttcagggttaaacagaatccaaatgtgctaggattaccatggttttgtatttgctaaaattagaattattctgtcagcttgctaaagagcatcaagtaactttagtaaaaaataacagatcattttttcttgctgtttaccggttagggaaactcaaatcatactgtgatagaatgacgacgagcatacaaggcttcaatttcactacttatacacagccatttagccaactgcagtcccatgaaagacattctttacccatcttgtctgacaccactccttaaagtcataatacacatactgtatttgagctagttctgacctgacccacgtatgacagagagcaacactaacacagcagaataaaggcagtgaataagaatttagaagcacttatcagggctaagactatatgagttacacacattttttaaaactacatcctgctatttcagtagattgacttctatccagaacgtgcaggagcattaggtctgttcatacaataaccctatctgattacccagggtcaagctactgtttatctttactagacagaacccatatcctgagtgggggacctcaaaccttccgtgttttttgcattacctggtgcaccacttccaggtaatgcaggctctgacattctttatacataatcacctaaaccataataaaaatactccaattttttgtttttttttaatggtaaaagtaaacacagacacaggggtcaggagctttgcctttattttccttctcaagagtgctcaacattttgcaaaagaaggatagtgctgccctctactgctcaatgttgaaatattattaataaacgaggttcctactagctttgtgtactagattaccacaatttattacactgttttaaacgaaccctttaagagttatttaaaagactgtgttcttggcaaacacattgaatttgtttccttcattatctcttcatataccttcatcttgtaccaaagagtaggattttaggacacgacacaaccaaaagaaggacattacaactttggggaagaaagcttaacatggctctagaagtaagagactgtactggtgatccatttaaggagaaacggggcaaggagaggaaattttcttctgacttcaaggtctgtagccttcccattcttctgttatttggagtgtcttcatttgtttttttgctaaggcaatccatttccttctttctgtttctttggagaaggctgctgccccaggatgtggagagaatagtgtttctaaaacatttttctattcttcagaaaaagataatatagctatacaaagggctatcattaacatttacattttaattaattattaataaagttgtcttattacctttaaattgccttgagattttatagatctctacaaagacttcttggagggctctagatattttgaaaattgtgttctctgttttcttttccatttgaaaaatatttcggagtacatgcctgcaaggggccagatcaggcagacttcaaagagagtttgcctaaccattagcaccctacagcaacccagggacgaatttcctcatatgacaatagtaaaaacaataatttctataactgtgttaaatgtgtgtatatcaacactaagcaaaattctttttaaaagtaaattacatataagaatattaaaactcagacacatcaagtaatttactcaaagtttcaaaactataagaggcaaagctagaatttgactccaggccccagcctacgtactgttctagtataccgctagtaatttaataaaaaagctaaacaaatctcaaaggcaagtgcttgtaaacaacatctgtgatgataataacggtcccagttaatacctgagtactaagtgtcaagtacaattcagttttgtatgaaatcatttaattaaattaaatcatttaatcctcatagcaatcccatgaggtagaactattattattcccagatgaggaaactgaggcatacagaggcaatctagttccagaggccatgcttttaaccattatgctaaactgtttcttaagcaacatacgaaaactatacaacacaatttctaaatggtgccatggaacttagtcacgttcaacaagtaagtaaaaccatcagtagttttcagtcctattgatctatctgttatacaaagatttcagcagctttaaataaagttctgcatatgtgggtactcagttcaggaactaaccttagaccgtgtccactctatgcccttctatgaggtaggaaacagaaaaataccctcacttggttcaatccatgtgtgcggattatgggaggagtcatacgtaagggagggaaggagagaactgagggaagagaaggagacatgattccatgaaggcacactcacgaaacaagccagtgaatttgagaggagaggtgataaaggatcactttccttaggaagaagagtaaactcattacagtgggagaacagcaacacctcaggagccctatgcttatcttatcgcacactatttagccacactgtgcctctataacagatctcatacggctttggtttttaaagaaacatttgctcagcacacaactcagcttctaaataatatcctacccatagtgccagcactcacccaaatataacgactccaaagaatgacaaactcatccctcccctgactttttcctaagtttagaccttcgggtattcaggggcaagactgagtaaaataagcatgtgtggcctggtgcagtagctcacgcctgtaatctcaacactttgggaggccgattgcttggcccaggagttcgagaccagcttggccaacacggcgaaaccccatctctacaaaaattagctgcgcatgttggtgcacacctgtggtcccagctacttgagaggttgaggtgggacaatcacctgagcccaggaggcagaggttgcagtgagccaagatcgtgccactgcactccagcctatgcaacagagtaaggctctgtctgaaaaaaacccaaaaaaccatccacatgcagatttacttacaggttcatgcagtgctcactgctcttcttgcctgtccagccctgcaggcttcagatttccaagacagtatgttctaaaggaattcattccaggtgatgctgttgctatatgggttcccagttcctcttttccacttcttttgaagaaaaggtttcagggacaggagcaggggaaggcagaagaaagatgctaggaggacttctgaacagacagtcataaggaaggcaggaggcagtgagaacaccaggctctttctcttctgacccttactgctctttccctggacactcactttatctggctgcctacctgtctgggcagcatccagctcttgagttgtttgcttgaattatccattcagcaaggaggcagtgttgagtcaattctaagcaattctaaatttaaagtgttaaaattagcgatgacttggaaagcattctgtttatttcaagactggcattaaattagaggggcagcctacaaggctcaagacagaaaggtactgcacttaatctccaagaacctcacactccctaggaaagcagtttgagacttggatcctacataatatataggcttccttctcccccagtaattgccttttaaaattcagagcagatattgtggggacatggagaaaaactgcacatggcaccttctttgtccctatcagcattggcttgattatggggcggcttaggatgttaataaatatttggtcttcgccaacattgtttaggtaacctagggttgtttttctcccagggaatgacgtagggagtgaccatgatattgctggccaacgctgtgaagatcatacttttaaatcaaattctgggaaggttaggctatacaatgcccccctcagcagttgccctctgcccctgcttttggaagcactgaaagttcgttgtcatttgaccttcagtgttgaacttgtaatgcttaaaatgttattagtgaaacactgtgggcagttacctttaaaaccagaggcaatgttttggaaaagaaatagataacacaaaaagttgacggatgttatacaaagttctttggcttgtgtttattactctgaatgaaaattcattttaagatttatagtattatccagtggagaggggctgtgatattgttttcttctgaaacaccaagagaattgactcttctaccatttgttgaaggcttagtaagtgcaagaaacctagggagactcacaggtccctagccaaaagaagctacatggccaacaagcatataaaatactcaacatcactaatcactagagaaacccaaatcaaaactacaatgagatatcatctcacaccagtcagaatggctattaataaaagtcaagaaataacagatgctggtttctggtgaggttgtggagaaaagggaatgcttatacaatgctggtgggaatgtaaattagttcagtaaccgcggaaagcagtgtggcgatttctcaaagaacttaaaacagaattaccattcgacccaacaatcccagtattgggtctatacccaaaagaatataaatcattctaccataaagatatatgtacatgtatgttcactgcagcactattcacaatcgtaaagacatggcatcaacctaaatgcccatcaccagtagactgaagaaaatacggtacatatacaccatggactactatgcagccataaaaaagaaagagatcatgtcctttgtagcaacatggatggagctggaggcctttatcctaagtgaactaatgcggaagagaaaaccaaatactgcatgttctgacttgtaagtgggagctaaacattgagaacacatggacacaaagaagagaacaacagacactgggacctacttgaggctagagggtgggaggagggagaggatcagaaaaaatacctgtcaagtactatgcttactatctgggtgacaaaataatttgtacaacaaacccacatgacaagcaatttatctataaaacaaacctgtgcatgtatcccgaacctaaaataaaagtaaaaaaaaaaaaaaaaagcagtttaccatctatgaagggtgtggcagatatgcaatgttaataatagctgacatttagagagtccttcttacatgcaactaaccacttcgtaaatgtattaactcacaaactccccacaccaactctgaggaaaatactattatttccacagagcaggaacttccacagagaggttaaaataacttgactaaacctgcccaaattcgtaagcggcagccagaatctaaacctagatagtccggtcccggagataggtttttaaccacaaaggcattttctaaaattgtgaaagtacagaagcacaggaaagagacattttggccagataagggttaagggaaggcttcatggatgaagtggcattcgctctgggtcttgaaggtcagcagatggagagggctcctggggaggaaggactctaacggggaaggaacagcctgacgaagaggaactttgggtaccagccagctgacgacagcaagatctggtccggtgcgcgcgggaggaagctgggaagggacgtcgcgcccagatcccgaggtccttgaggaccaggccctctctgcaaggaatcggggaggaaaatctcaaactattaatagaagagcggcaaaaaggaattcgtgcgcacccctctctgttggaaggaccttccctgccagagaccaaggctggcaggacaggtatacttccctcagggggaaacagccgacaaaggtggtcaaggtcgcccgcgcaggctccggagctgcacgtcctggacgaacactcccgtcccgagcacagacgctgggtatttggctgccagcccgggcccgccaggccgggcctggcaccgccaacacctgctcggcgggaacaggaagacctgtgttcgggaactccctccggccacctccccgtatcctcctggccctcgaaggtcgaaaggtggcctctcagggacacccgccgctcgctcggctcctcccctcagccgggagacccaaggaataacagcctctgcgataggagcacrctctaccaatcaaccgtagtcttcgcccacgcctcagccggaggaaattgcattggttgcatcattctcggcagccgataaattgttttcttggattggctaatagcgttccttcycccctgtgccttygtcgtcagaagctggcgattggttaatcgcgttgccaagctttggacgcggctcgaccattggaggccgcgggcccgcccccgccggctaggtgaaggtgagtgtctcctccagtcgcaacggccagacctgacctgccagctccgggcgtggggtgaaatctcttgattcctagtctctcgatatggcacctccgtcagtctttgccgaggttccgcaggcccagcctgtcctggtcttcaagctcactgccgacttcagggaggatccggacccccgcaaggtcaacctgggagtgggaggtaaggatgtagtgctctggagtgtgagcagctcggggagtggagcggacccaacccaggtcgtggagactgtgggagaagccgaggcccagtgtggcgctgcctgaagagggcggcgccggagaggaggctggatccacgaaggcttcctaaaacctgcccattttacagatgcaggtgtggagtccctggaaaggggcgatgtgtccgaggccgcacaaaccaggtgtagcagccaagacacaaactcagtctttccgattccccattctgccttctttatactgcatcctcctaagaaatgaggctgccggagcttgtagagagaggtagaaaaataggaagcctgataggcttagggttctggttgctaggaaatgggtaaaggagaacttttaacgctagaaagctctgttctgagtcggtaaatatttgagtgaccaccgagtatcaatcagccaccttattaagctttgtagggggagactgaggcttgattttgcccttaaggatttaaaaatctgctggtgttacacaatgctttgagacaggttaatgctgcccccggggggtctggggagatggttctggccgtcacagatgtggtaggaatgggtagagatggtggaaaggagtggagagaagtatggatggtagaagcttactttccacacatcctatcttcatttcttgattcaagtgattctcttmtgtaccttggacagctcagagcatgggcctcagtttccccatctgccaagaagatttatattggagtgcctctcaaattttttacccctaaccctctctgatgaatttgttattcttctcactatcatttggatgtttgaagccccacagacacttattttctccatttggattttgccacgtgcaaagaccagccagagagatgaaaatgggtaggataaagtcttatgctaggtaatagacttagaataaaaggactagaaattgtggaaagagaaggtggaatcattttgtagcagagtgtgacatgaaggacgctcagaatcaggtttctcatagataacgtttkgtctgtgcatagcatttgttaaaaaaaaaaaaaaaaagtcggccgggcgcggtggctcaggcctgtaatcccagcactttgggaggctgagacgggcggatcacgaggtcaggagatgagaccatcgtggctaacacggtgaaaccccatctctactaaaaatacaaaaaagtatccgggcgtggtgttggccgcctatagtcccaggtactcgggaggctgaggcagaagaattgcttaaacccgggagacggaggttgcagtgagccgagatcgtgccattgcactccaggctgggcgacagagcgagactctttctcaaaaaaaaaaaaaagtcttcactaaggagtatggggaggggtaaggaaaaatccattgaaaagtgatggtttgttgaagcgggtaatttgttgaagctggatgatgggtacatgggcatacgttatattattctctcagcttttgtataggtttgaaatttttcatcataaagcttttaagataagtcagtactacatagtttggcccattgagggaaaatgatgtttttagcaggcaactgagtgggagaaatgttgaaagattgcctcaaattgaatttgaatggacaccatttggtctcttaatttaaaaccagtccaaaacctccaagcgtttctttgcagcsggatgtatacaaagaactagtattactgtcaatctaaatacatctttttaaaacgtcagattttgcctgccacggtggctcacgcctgtaatcccagcactttgggaggccaaggcaggtggatcacctgaggtcaggagttcgagaccagcctggctaacatggtgaaaccccatctttactaaaaatacaaaaattagccagacgtggtggtgcacactggtagtcacagctacttgggaggctgaagcaggagaatcgcttgaacctgggaggtggcggttgcagtgagccaagatcacgccattgtactccagcctgggtaacagagtgagactccgtctcaagaaagaaagaaaaaaaaaaacaaaaaaccacgtcagatttattttattaattcaatttacctttgaactatcttacagggtttctgtgaggattaagtacatttaaagtgtttatagctgtatttggcacataagtaggatttatataagtgttaggtattactgttattgttgttttggcatttctttgagtgattctcataaaagatattgaataaaaattttcagttcaagaactgcaaaatgaactaatttatgaccttggttcagaaataaactgctcctgcagagaaaaagcaccccgacagcacaggccagaagcaatggactcagaattggagtcattgactcagacggccacctcagctgtgaaggtgcctttgtcatgttttccaggaactccaactccttaccatgagcaaattatttatgcatgtaatctcactgaatgctcacaactctggagggtggtttattactattactgtttagaggcaaggaagccgaagactggagaggtgaagcaatttgccccaggtcatttgaccactgggtggtagagctgggaatccaggccaggtctctcaggcctcagagtctctgcccacacctgtatttcaggtacctccaggtggtagccagtacactgtagtgggaagagccaggagacctaggtacaggcccagcaccgtggtccagccatgtgacttggaagggttgtttaacatccctggggctcatctgttaaatgaggagccaagattgaatgacctctctcccaaattctactcttaagattctactgggccaggcayggtggctcacgcctgtaatcccaacgctttgggaggccgaggcgggcrgatcacgaggtcaggagattgagaccatcctggctaacacggtgaaaccccgtctctactaaaaatacaaaaaaattagcagggcgtggtggcgggcgcctgcagtcccagctacacgggaggctgaggcaggagaatggcgtgaacccaggaggcggagcttgcagtgagctgagatcgcgccactgcactccagcctgggcaacagagtgagactccgtctcaaaaataaataaataaataaataaataaaaaagattctactgtactaaaagtcaactccacaattcactagcacattctatgactgtagcgtaggataataattttactggcctcatcagttgtctgaggattaaatgaataattatatgtgaaatgtgatatataaatgaaaagtgtcatatataagtgttatttttgatcatcactgtgacccgtctttttgtggatagcaggtgtttggataaggatctaattagagtagaataaaaggtctccttccagccgttatatgtcctagtcttatttatacacatccccaagtataccccttgtgaagaaaatgtaattaatcattgaccttagggaagatactttttttcccccaagttaatataaaacctaatggaggttatctagttaatgttccagtgattttggacacgtttagaataaactgcacctgtaatctcagacagttcctacttgcagctagtttcctcagtttttcttcttgctgtgatgatttaaataatttccttataggtaaacagaggagagtatcacattttccactgctaagcacaatgctttctaagttgatcattttagtgcttctcaaagcttcagactgaagtggttttaaggacatgggaaatggatccaacctggtgcaacctgtagcaagaagtttcttcaaagactccagtccattttttcatgtgagcctagctttcttttggcccagataaactctgctagctttaatatttcttattttcaacatggtttcctagcatcttcaaataaaatagttgggaaaatatgctttatcagatgtttctgagtacccctagccttctccccagtatcctaataggctcttgagtggggataggtgagggaagtggcgatcttaggaggaagatgagggtgatggtttgaccatttaaatctgtgttctttcttcctttccttctgcaaagcaagactgctgggcccacctgtagactgtgtgactcccctaaaagggtttatgtccaggaagaagagcagtggggcatggagctggggagcatgctgataaaaaggcccctgacatggtcccaggggcctgcttgcttcaggctttctctagacatctcttgcttttaaaaaagcacatggatccatgaacttaatagtatgacagcctagctcttgttatctctgtgaycctgggcaaatggtttgacttttctggctgcagcagccagatccttaaaatagacatcacaatatctattttgtgggttgctatccaaattaaatgagagtaaagaaatgtatttagtgcagtaccttgtatgtacaaagtatttagtaaatccgtgttgttatttctctgccctcaggttccgtcaatgtctttctccatgccccagacctcatctctgaatgtcaggcctacagtggacacatcctacaactccctcaaattcagcatgttcaaagcacagctcatcatttccaccttccccttgatcttttcttctatcttccccttgtgttctaggtcttggtcgaccccactaccaccatccactcattatccagacttgagggagaccttggagtcaacagcagccctttccccaatcccctgtctttttatttggtcaataggttctgtcttttctacctcgaatctatttccaatggcaccccttttcttcatccctgctgccattgtgtgaattcaaggcctcattatttcgcttctggaatattgcagtagctttctactccttctacttctagtaactcacccttcttaactactgtctctgtccttctctctggtttattttctgtggtgtcactcaaatgatcccattaaaatgtgcagctgctcatgttactctcttgcttaaatgctttcagtggttacccattgaaactgaagttccctaaaagagactccaggattcttttagccactcccagctaatccttagtggattccacatcagagtcatgaaaatgcagatcctcaaagacctcatgctccccaggcctctggggccttgcacaggtgtgccctctcgcatgcccttcttcccttgtttaccttttaaactcttattcatctttcattcttcattctctgtaaaatcttctctgattcctcaaattagaattaaaggctctatctatgctctgtgtttcttggagggcagatgggatcttattttatcaatctctatagcttctactagccagtgcctggctcatggtgagacttagtaagtacttgttatgtgagcgagtgaatgaaagagtgaatgagaaactcaagggtccaacaaataggaataaaaattcttggggacagcaggaatagtggttgttgttaatgcctgaccccactgctccagtcacccaagaggaatctggttctgcttcactagggcagttaggagaggcatcaggaacaaatctagaactcaacctgggaaaaactgggcaatggagaaggaaggggagttgtaaattggccagtttttttttagtcacagtatagacacaatgcctctccaaccatccccaacccaagtagtagtattggaattttagagtttcacagagtattcagtagtggtaagaacagcagtattccagtcttttctttctctttcatattttatttattcatagcacattatttgtgaatgacatattatcataaatataaacacatarcctaataatgttatagaatagatrtaacacccagacacagaactgaaacataacagaactggtttttctataaacatcccaaatttttttgcatctacctagtatcctttgtaggtagttcaaatatgcttttcttgttccaagatttctagaaaccccttttagactagctatcaaggcatgtaggacccacacaagggatcattttttaaaataattgttctccgtaagttttacccagcttattcactcactcttttcaatggagatgatgcaaatgctattcccgaaaaataattgactttcaaaggacaaagatttggcactattgaggctattcaaaataatgagatgttgcctctagaaacaattccaaaagaagtttcaagaatattttgaacaatggtaacgttgtgatcatagatatgttgatgtgctttagggacaactcttacttggaagtagctattttggtacatctttagagaagccagaccaaatcccagctggcgaaggaggctttttgaacttgttgagaagtttggtggactaaggggtatatcatgaatggtatgagagtattgtgagttgggccaggcatggtggctcactcctgtaatcccagcactttggaagtccgaggcgggaggtttgcttgagcccaggagtttgagaccagcctgggcaacaaagtgaggccctgtttctatgaaaaatttaaaaaaaaaaaattagctggtcctggtggtgaatgactttggtctcagctacatgggaagctgaggcaagagaattgcttgagcccagggggttgaagctgcagtgagctgtgttcgtgccactgcactctcacctgggcaacagagtgagamcctgtctcaaaaaaagaaaaaaatattgtgagttagattcaccagagccggagggtagactatgagtggtatgagagtattgtttgattcacctacccagaggcatttggtcagtggctctgtcagtctgtagccctgtccacatttctattactaacttgaaatgtttctcagatttgcagatgacatattcctggagggtagagttagctgatcattcaaaatgatcttataaagtctttttactgtatatcctgtgacctaataaattaacatttagatatttttcctaagaaaacactcatgaatawgtgtaaatatatgaacatttatcacaatgtttataatagcaaataatttaaagcaacacagttaataaattatatataaaacaaatattatttatccactaaactgatgttgtaaatggctcatatttatgaaaaatacccaattgcattcataataagataaatgcaaattaaaactacttgacatattatattggcaaaaatacactcagtgcgtaaggctgtgtggaagcaaacgctcttaaacagtgctggtgggaatgtaaattgatataattcctgtatcaattgggacaatttggaaatatttgtcaaaattacaaaaacacatacttcttagcccactcttttgttttccacccagcatcttacagatatatttgcatacatgtgagatgacgtatgtacagggtcgttcactgaagtattgttttaatagccaaagattgtaaacaactcaaatgtccaacaagagactggcaaagtaaaatatggtacattcatcagctaagcagctgtaaaaaagaacaaggacgctctctatgcgcaaatgtaaaatgattttcaagtggaaaaagcaaggaacacaaaacagtgtatagtatgccgtatgctaccttttgtttaaaagggcatatgtaagaagctgtgtttgcttgtgtaggcatagggaaatgcaggaaggatatgtaagaaactaacagttgttatttatggagggagggatttgagaactaggtagatagaggataagaatgggatggagacatgcaaacatgtcacctattagaagaatagttaatgaggaggaaaaatgcatagtatatatttaaatggaaaaaagcatgttgaaattctatgtacagtttgatccatattttataaaagaatatgcccatcaaaaataaagcttagaaggttgtacaccaaaattttcatactccttgtctctgagtactgggattatatgttatgttagttctcacactgctataaagaactacctgagactgggtaatttataaagaaaagaggtttaatggactcatagttccaccggccatataagaaacatggttgggaggcctcaggaaacttacaatcatggaggaagagtgaagcgcaagcaagcaccttcacatggcccagcaggagagagagcaaagcgggaggtgctatacacttttaaaaaaccagatgtagtgagaactcactcactgycacaagaacagcaaggcagaaatctgcccccatggtccatcaacactggagattacaattcaacatgagatttgggtggggacacacagccaaactatatcagtctactcctgacccctatcaaatctcatcgccttctcacatttcaaaacacaatcacatgttaattataatgtttattttttaccttctgggcttttcccaattttctacaatcaacacgtgttgttcagtaaatggtaacaacaaccctaaaatgtaattttttttttaagtcagggattaattttgggcagaaatcaagaaaataaaaatcagtatcactctaaaattttgtttccatttcaaaatcacttgcgtaagtgtaggattattgaggacctaaacattcaaacagagaggcaaatgacccctgccaggaatcctacttggacagattattggcgtgggtgcaaagctaaggtaactgccctgtaaagctctaatcctaacataatcatagaatagtgtagggaaaaaaattggtgctggataactcagagtgacttaaaaatactttcagaggaagaggaaatgcttagaggtttactgtagagcaggatcaaatattgtgaaatagatcaatttagatcaatgaaagggtgaggcagatgaagtgggatgaagtcagaagggtaaacactggctgaggtcaaaatacagagagaggatagagatgtgtttaagtgggtccttgggtgattgtgtcacctgtcattgaaatcgtcagggcatttgcttatcattcgtcttatttctgttcctctgggacaagaggagtggtgggccttcttccactccttctccatgtttgtgttaaaggtgccaggttcatgtggaagtagcacctaggctttttctggaagtctcttggggagatgcagaaggaagaagactgctgggccaatggcctagagacctcagtgcactagtgatattgacatgacatttgcaagatgctttttactttgcagagtgcttttctatgtactttctcatgtgaccaggctctgtgatgtcccagttttatttcagcattctactttttggaggtcacatagttaagagctgtaagttccacaaggatggggaccacatctgcccttatgtttgcccagcacctagcccaatgcttggctcaaattaggtactcagtaagtgaacaaacttttctccaatttccttcactgttctgttttgaccggaaggtggtgggattctcctrgttcacagttacaaactcttaacttggacacagcatgagcctccactatgtataactcttttccattctccagcatatcgcacggatgactgccatccctgggttttgccagtagtgaagaaagtggagcagaagattgctaatgacaatagcctaaatcacgagtatctgccaatcctgggcctggctgagttccggagctgtgcttctcgtcttgcccttggggatgacagcccagcactcaaggagaagcgggtaagttttgggtaaggatgtattttctctttagaaactgaaagtaaaaagatgttgagaatacagtttgtttaaaatattaggcgttatgtctattgaactgccaatgaataagtgtttctgtagcgcgagttcaggaacctgatagcgcaaataatgtggccatgtacaaagcacggctttttcacttgttcagttttgcccagtagatcatcagattttagctactgcatttgaagcagtcagtggagatgccaagtagaaagaatttaatggagtgataaagacaccagggttctagatccaactctgccactacttttgatcataggcaagtcatttagccctctgggctcacatacacatgttagaaaaagaccacatagtgcgagtctgtgatcccatgaggagcacttgcgtagggaattgtttaaggggcctctgagtcccctgaaattatatgcagaattttgtgtgtacttatttcttgggagaaggtgcatagcttttagcagattttcaaaaggtgtctgtggcccttcaagggttcaggagctactagtagatgctgtctaaagtccctgccagttctaatattctttaatacttctactgttgatctcagcacctatcatttaagtgcttcctggtatatagtctgtgtgtaactggagatacatggaggaagaacacatttggaagtagacacagtgagataggctgtgtgttccaggaagtggaacagattctcagtgttgtaggaattcagaggggagggagacctatgagtgctggagatggcacttgagctgaatcttagagaatgtgtgagcgaggccgggacactggttctcagctccagctggatgttagtattacctggggagtttttaaaaacatactgtggctgggccctgtggaccccatgccaggccaggtaaatcagaatcttggaggcaccacccttctcccctctctttcactcccttttcttctcccccatgggcatattttttaaatactccccaggtgttttcaaagtatagccagttttgagaaccataaaatatggaagaggggcaagaggaaggatattcatcttgcatggtaggagtccagggacagaggcaagagctaagcaggtctagcttgtaaagagacctacctgatgagagctgggaacatgttggataggttaggcaggctgattctggcagccagggcaggagaagccaactgaaggttggagcagaggagttacccaataaaagtgttgtttgaagaagataagtctgattgggtgggtgggaaaaagaagagctcagatttttgcactagtccagttgggaattgcacagtttaaaccagtggccattatcattcccctgggtcagtgttgtgatgtagcctgtaattcatgcattgaggaaaccacatcttggagtcatctgatttattmcccacatgctgtgtacagtaggttttccttttatatatcatgttacccagatgccctgataagcagaatggcagaggacaataaaggttgcacacccatacatttgtacatgtaccaggaagcagggaaggccctggtgaaggtcttgggactcaggtccatgattaggcaagtaatgaacttcattaaggttttgtatggattggaatgagagactatgatttgcctcaatgaactgaagtcatatggttagaatagttaagagtatagagattattaatcatattgggaagtttttctgaaaatccagtgtttctgcagaggtagaggagaatcctaatgaagtttgaaagtggggaactggccaggcgtggtgatgcacgcctgtaatcccagcacttcgggaggccaaggtgggcagattacttgagctcaggagttcaagaccagcctgggtaacatggcaaaaacccgtttctacaaggaaatacaaaaattagccgggcatggtggcatgcatctgtagtcccaggtacttgggagactgaggtgggaggattgcttgaccccaagaagtggaggctgcagtgagccatgattgcaccactgcattccagcctgggcaacagaatgggaccctgtctcaaaagaaaagaaaaaaaaaaaaaaaagaaagtggggaacataggccactggggcctctcttctgaaactaaataaattagttggaattctgttgctgacaaatgaaaacagagattccatgttggggagtttcttcctctaatactgcatttcttatatagttgttaactatgttgggcagrtgctgttcctctgcccattgatctccatttgatgacttamactgtaagacttaaggctattttttgtagccttgaccctgggaacatagccctccctcttaatctagtttctcctgttttatatttttgaccataaaacaattttaaaaggccatcttcatggcagcaaatatttgaagatatactttttggatactctcttggcatctattaatacatcactgtgggtaccagtggttattgagctctgagcccttctttttatatatatatatatatwtttttttaattatactttaagttctagggtacgtgtgcataacatgcaggtttgttacatatgtatacatgtgccatgttggtgtgctgcacccattaactcatcatttacattaggtatatctcctaatgctatccttcccccctctccgcaccccacaacaggacccgtgtgtgatgttctccttcctgtgtccaagtgttctcattgttcaattcccacctatgagtgagaacatgcagcatttggttttttgtccttgcgatagtttgctgagaatgatggtttccagcttcatccatgtccctacaaaggacatgaactcatccttttatatgtgccacattttcttaatccagtctatcattgatggacatttgggttggttccaagtctttgctattgtgaatagtgctgcaataaacatatgtatgcatgtgtctttatagcagcatgatttataatcctttgggtatatacccagtaatgggatggctgggaaaatggtatttctagttctagatccctgaggaatcaccacactatcttccacaacggttgaactagtttacagtcccaccaacagtgtaaaagtgttcctatttctccacatcctctccagcacctgttgtttcctgactttttaatgatcaccattctaactggtgtgagatggtatctcattgtggttttgatttgcatttctctgatggccagtgatgatgagcattttttcatgtgtctgttggctgcataaatgtcttcttttgagaagtgtctgttcatatccttcgcccacttgttgatggggttgtttgtttttttcttgtaaatttgtttgagttctttgtagattctggatattagtcctttgtcagatgagtagattgcaaaaatgttctcccattctgtaggttgcctgttcactctgatggtagtttcttttgctgtgcagaagctcttgagtttaattagatcccatttgtcaattttggcttttgttgacattgcttttggtgtttaagacatgaagtccttgcccatgcctatgtcctgaatagtattgcctaggttttcttctagggtttttatggttttaggtctaacatttaagtctttaatccatcttgaattaatttttgtataaggtgtaaggaagggatccagtttcagctttctacatatgtctagccagttttcccagcaccatttgttaaatagggaatcctttccccatttcttgtttttgtcaggtttgtcaaagatcagataattgtagatgtgtggtattatttctgagggctctgttctgttccattggtctatatctctgttttggtaccagtaccatgctgttttggttactgtagccttgtagtgtagtttgaagtcaagtagcatgatgcctccagcttaggattgacttggcaatgggggctgttttttggttccatatgaactttaaagtagtttttcccaattccgtgaagaaagtcattggtaggttgatggggatggcattgaatctataaattaccttgtacagtatggccattttcatgatattgattcttcctatccgtgagcatggaatgttcttccatttgtttgtatcctcttttatttcgttgagcagtggtttgtagttctccttgaagaggtccttcacatcccttgtaagttggattcctaggtattctattctctttgaagcaattgtgaatggtagttcattcatgatttggctctctatttgtctgttattggtgtataagaatgcttgtgatttttgcacattgattttgtatcctgagactttgctgaagtggctcatcagcttaaggagattttgtggtgagacgatggggttttctagatacacaatcatgtcatctgcaaacagggacaatttgacttcctcttttcctagttgaataccttgtatttctttctcctgcctgattgccctggccagaactttcaacactatgttgaataggagtggtgagagaggacatccctgwcttgtgcccgttttcaaagggaatgcttccagtttttgcccattcagtatgatattggctgtgggtttgtcatagatagctcttattattttgagatacgtcccatcaatacctaatttattgagagtttttagcatgaacggctgttgaattttgtcaaaggccttttctgcatctattgagataatcatgtggtttttggctttggttctgtttatatgctggattacgtttattgatttgtgtatgttgaaatagccttgcatcccagggatgaagcccattgatcatggtggataagctttttgatgtgctgctggatttggtttgccagcrttttattgaggatttttgcgtcgatgttcatcagggatattggtctaaaattctcttttttggttgtgtctctgccaggctttggtatcaggatgatgctggcctcataaaatgagttagggaggatttcctctttttctattgattggaatagtttcagaaggaatggtaccagctcctccttgtatctctggtagaattcggctgtgaatccgtctggtcctggactttttttggttggtaagctattaattactgcctcaatttcagctcctgttattggtctattcagagattcaacttctttctggtttagtcttgggagggtgtatgtgtcgaggaatttatccatttcttctagattttctagtttatttccatagaggtgtttatagtattctctgatggtagtttgtatttctgtgggatcggtggtgatatcccctttatcattttttattgcgtctatttggttcttctctcttttcttctttattrgtcttgctagcggtctatcaattttgttgatcttttcaaaaaaccagctcctggattcattgattttttgaagggttttttgtgtctctgtctccttcagttctgctctgatcttagttatttcttgccttctgctagcttttgaatgtgtttgctcttgcttctctagttcttttaattgtgatgttagggtgtgaattttagatctttcctgctttctcttgtgggcatttagtgctataaatttccctctacacactgttttaaatgtgtcccagagattctggtatgttgtgtctttgttctcggtggtttcaaagaacacctttatgtctgccttcatttcgttatgtacccagtagtcattcaggagcaggttgttcagttttcatgtagttgagcggttttgagtgagtttcttaatcctgagttctagtttgattgcactgtggtctgagagacagtttgttataatttctgttcttttacatttgctgaggagtgctttacttccaactatgtggtcaattttgaaataagtgtggtgtggtgctgagaagaatgtatattctgttgatttggggtggagagttctgtagatgtctattaggtcctcttgatgcagagctgagttcaattcctggatatccttgttaactttctgtcttcattgatctgtctaatgttgacagtggggtgttaaagtctcctattattattgtatgggagtctcagtccctttgtaggtccctaaggacttgctttatgaatctgggtgctcctgtattgggtgcatatatatttaggataggtagctcttcttgttgaattgatccctttacaattatgtaatggccttctttatctcttttgatctttgttggtttaaagtctgttttatgagagactaggattgcaacccctgccttttttgttttccatttgcttggtagatcttcctccatccctttattttgagcccatgtatgtctctgcacgtgagatgggtttcctgaatacagcacactgatgggtcttgactctttatccaatttgccagtctgtgtcttttaattggagcatttagcccatttacatttaaggttaatattgttatgtgtgaatttgatcctgttattatgatgttagctgcttattttgcttgttagttgatgcagtttcttcctagcctcgatggtctttacaatttggcatgtttttgcagtggctggtaccggttgttcctttccatatttagtgcttccttcaggagctcttgtagggcaggcctcgtggtgacaaaatctctcagcatttgcttgtctgtaaaggattttatttctccttcacttatgaagcttagtttggctggatatgaaattctgggttgaaaattcttttctttaagaatgttgaatattggcccccactctcttctggcttgtagagtttctgctgagagatcagctgttagtgtgacgggcttccctttgtgggtaacccgacctttctttctggctgcctttaacattttttccttcatttcaactttggtgaatctgacaattatgtgtcttggagttgctgtttttgaggagtatcttcatggcattctctgtatttcctgaatttgaatgttggcctgccttgctaggttggggaacttctcctggataatatcctgcagagtgttttccaacttggttccattctccccgtcactttcaggtacaccaatcagatgtagatttggtcttttcacatagtcgcatatttcttggaggctttgttcgtttctttttattcttttttctctaaacttctcttctcacttcatttcattcatttgatcttccatcactgataccctttcttccagttgatcgaatcggctactgaagcttgtgcattcgtcatgtagttctcgtgccatggttttcagctccatcaggtcctttaagtacttctctgcattggttattctagttagccattcgtctaatcttttttcaaggtttttaacttctttgcgatgggttcgaacttcctcctttagctcagagaagtttgatcttctgaagccttcttctctcaactcgtcaaagtcattctccatccagctttgttccgttgctggtgaggagctgcattcctttgtaggaggagaggcactctgatttttagaattttcagtttttctgctctgttttttccccatctttgtggttttatctacctttggtctctgatgatgtacagatgggtttttggtgtggatgtcctttctgtttgttagttatccttttaacagtcaggaccctcagctgcagatctgttggagtttgctggcggtccactccagaccttgtttgcctgggtatcagcagcggaggctgcagaacrgggaatattggtgaacagcaaatgttgctgcctgatcgttcctctggaagtttcgtctcagaggggtacccggccatgtgaggtatcagtctgcccctactkgggggtgcctcccagttaggctactcaggggtcagggacccacttgaggaggcaggctgtccgttcttagatctgaaactccgtgctgagagaaccactactctcttcaaagctgtcagacagggacatttaagtctgcagaggtttctgctgccttttgttcgagctctgagcctttcttctgcttggaaggcctcaccattcccaggctgctgtcttagttcactaatagcctcttaatttaccttcctgcctctagtctcttccctgttttagtacattctgcatgctgcagctaggatgaccttccttggcaaaacaagctactcatgtcacctgttcccactccccacccccaccgcccatagctcccccattgcctgtagggtaaaatccagactttgagcttggcatgcagtgaaagtaggtgacaggtgacagtcttcatcctgttcttacagttgctgatttcccctcactccactagaggtcctgacattctaagagtcttgctgttctctagacctactgggccctgtcaagactaagaacctttgcctggcccttctctccatttggaatgccctcccttattgctctagctgtccagtccccacctctaagtccttcaagagctgatcaagggtcacttccacactgaatccttaggtattttaggcagagcttgttgtttaagctctctgagttatcacaggactttgttcacagcttgggaataacagtacttaactgttcttactataatggataattttataagtcttcatctcccacaaggccctaactttccccaggagagtgatcattgcttatttaccttgcagattttcagcatttggctcctatccgggtacctcaggttccaaaggtttggattcattcattcctttagtcatcagatgcccactactagagccaggcactgttctagatgctggagcacagcagtgactcaaacacacagaatcccctgcccttgcattcagtttcggggagaggaacagactctaaatgtaatctttttgactatatcagtaagaaaatgaygtagtatactaaagatgataaatgctataaaaatggagcaggaggtggcatgttaggaattctaggagtggatacagttttaactagggtggttatgatagaaatagaaatgacatttgagccaaaacttaaagacgagacataaatgaaagaatgagtgaacaagtaaaccaacagtaattgtttcttcccttagatttttcttctccagattcaacatttccagatcctttacccattttgaggagacctattttctagactcctcactgccttgtattacttttccactttcagatcttaggatccagacagaaatgtcgatttttcatctctggcatagtgctgtttcagctttgagattactgagcattgtaggaaggagggctcatgggtcataactcattgtcacatcatgacatcccactctcgctttgattgcctctaggcgacttggggcttctgctgtggctcagatcttttcaccactgtcttctttcttcatctagttcagcacatgcttatgtagtaccatgtgccagatgccgtgagagatgctgggggcacccagatgaatgcagcatggctctggccacaggcagctcctggttgctctcctattcctcatggtgaagtcatagtatcggcaaattgttatctcagacaagggttctagaatccagcaatcttatgctgacatgtccaacagaggcctgctctatctagcttcataccaagtcttcctggatttcccttgttctggatactcttgtttacccaggtccagttgcctggctccttgagaagtctgtacttacttccttygatgttatgattttcctttataacaagtacaggacattcttaggctgtaggacaatttgccaaaaatcagttcacagaatgaccacattgctatattattgattcaccaaaaacttgtttctgttagttgctgatgtttagagcaacttgtgtttcactgaagccatccagtatttaatakatttttagggagtgataacttcttgagaatttgatatttcaagtgtcatatatgtcatgaatgtcaaggattagttaatgtggagtgggtttatctcttctaagcacatttttaatgtattctactgatttttaaaaaaatgaatttgctttctgtagtgggagagaaagggtggagtkaaaagttgagaacaggaaatgaaaaattatgcctgggaatgtttccactggtatctatgcatctatcgtgtttccagaagttaaaaccatgttcaagggaggtcttgctcatttgcttaggaagtattagcactctagagtggcttaggtatctgcaatgtgaagtcatgtatgaaactgacattcaacttagctggatgacaaatccataaaaaataaatgcacatttgtgttatatcatcttggtagcaatttgcataaagaattcaggtaaaccacaatgtgggggcaaaacttttaaagtaatagcaagggatgagtgctcagtaaggatcactgtaaataacagagtagttagcacaccaaatctgacacacactgagcattttcaccccagtgcactgcctttgcccctctctgtaatgtacagctatgtttagttctgcatccccttgaatgtcaactttgcttatgtttcacatttcagatagtattctttcacagatgctcacacctataaatacaaacagaacattggtgcataatagtgccgataattggtaacattaccttgttgttggcttaaatgggatttctactaaacgattcactgtttttaagctgacttatgggttaaatgaatttttttcagtcattttcaggaagtatccactgtttcctgttttactaagcatttatctcaggaatagccaagcttttcttacctgttgtgatgatcatttgggttttctctatctagcagcatgattggttttatatctcttataatccattcatgggatgactctcaatcaagggggtaattttaatgtactgctggattaatattgttcattaatgtttacttgggaagttagtatcaaggtacgatctaggtctctcattctacttttttcccttttgttgtcttttagcagcaatgttatgttaggttcttgaaaagatttaggaagcttttcttctctaagaagagttttaaaacttttttattggccaggcrtggtggctcatgcctgtaatcccagtactttgggaagccgaggcaggcggatcacgaggtcaggagttggagagcagcctgaccaacatggtgaaaccccatctgtactaaaaacacaaaaattagctgggtgtggtggtacgtgcctgtagtcccagctcctcaggagtctgaggcaggagaatcacttgaacccaggaggcggaggttgcagtaagccaagatcgtgccactgcactccagcctgggcaacagagcgagactctgtctcaaaaaacaaacaaaaaaaaaacacaaaaaaaacctttttattatggaacatttcaaatctatatgaaagtagagaaaacagtataaagaatgaatccctgtgtatccatcacctagcttcaacaattatctgtatagggtcaatcctgtgtatttccatctacccactccctgcctccctgcctccctgccctccacgaaagctggattattatttaatagtaaatcccagacatctaaataggtgtttgaaattgtaaaattttatgactaatacatgaatacattcatcttatttttaaaaaaacgacttatagattaggccaaagtccctttcaaccactattcctacatccttggacccctccccagaggttgccactgttagaagattggcgtgtgtccctccttgtatttacttatttatttatttgagacagagtctcactgtgttgcccaggctggagggcagtggtgcgatcttggctcactgcaacctctgcctcccaggttcaaatgattctcacgtctcagcctcccgagtagctgagattacaggtgtgtgccaccatgcccagctaattttcttgtatttttaggagagacagggtttcaccatgttggccaggctggtctcaaactcctgggctcaagtgatccacccaccttggcctcccaaagtgctgggattacaggcgtgagccactgcgcccggctagatagactttttcatgtgatctttttcttcctttctcttcaatcctttagacaaattgggcaacatggggtttatgacatttttctgctgagagacttatgctgaaacctaattagaattttgaagaggcaaaatcaaagatctataggcagagaactacatcattagaatgtagtgactccatctagaatggaaaacctggatttgtgctgagctgtgccactcacaactgtgtatcctttgggaaaaacatgtctctgaatcagttcctcatgtttcaggggatatagacttgactttagagggcatgtgggcattgagtatacatgaaagcattttgtaaatgataaaatataggaatagaaaaccaaacacctcatgttctcacttaaaagtgggagctgaacaatgagaacacgtggacacagggaggggaacatcacacacgggggcctatcggtgggtgggaggcaaggggagggagagcattaggacaaatacctaatgcatgcggggcttaaaacctagatgacgggttgatgggtgccacaaaccaccatggcacatgtatagctatgtaacaaacctgcacattctgcacacatatcccagaacttaaagtaaaataaataaataaataaataaataaataaaatatggcttttattattgcctatgttaggtcactttaggatgagaggaagccagccaggcgcagtggctcacacctgtaatcccagcagtttgagaggccaaggcaggcagatcacaaggtcaggagttcgagaccaacctggccaaaatggtgaaaccccgtctctactaaatatacaaaaaattagccgggcatggtggcaggcgcctgtagtcccagctactcgggaggctgaggcaggagaatcacttgaacctgggaggcggaagttgcagttagctgagaccatgccactgcactccaacctaggtgacagaatgagactgtctcaaaaagaaaaaaaaaaaaaatgagaggaagccaaggagaagaaagtagtactcatgcatcacctctgttttgttagaacatacttctaaggattaataagcctgaattctagagatgaggagtagcacagattgatgtcaatgacaagttaggaacactgttttagaggcttatgctagagggtaagtttgatcttaggatgggtgctgaagagatgggtttgccttccaaggcatgtgcgtgcatgcacacacacacacacacacactaatgtggcctcggtgtgtcctctacctctgtgttcagaagggaagcttcttctagtgtcagacctcctgggttgaagactggcactcctgctcagtagctggtaactttgagcaaggttcttcacctctctcagcctcagtttcctcagttgtaaacatgggcaaatmatagtacctttttcatgtagtagttgtaaggttttgatgagataatacaattaaaagccttagcacagagcaggcatagagtaagtgctcattattaccttatttttgtaaatattatmtgacctcaccattatcagcctgtgaccctgtttcttctctttcaggtaggaggtgtgcaatctttggggggaacaggtgcacttcgaattggagctgatttcttagcrcgttggtacaatggaacaaacaacaagaacacacctgtctatgtgtcctcaccaacctggggtgagtctttcagctgaagtgagaggaaaaacagaaaccagagagaattatcctcatgactctccctggttacacagaaaatgtaatccagccctagaacaactgactgttgggaatggcttgaacagtgggttatggcagtgcatgagaaacctgctgctcaaaatcaagttaagaatactctttctcaagactcttagtagacttgtatctaccaaggctatgttgaaactccccagaggaggcatagaatgtagatgcaggaagtatcattgtagtagaatataagtctggcattaatgtgactggttgaacttgttcttggttacaatcattcctctacatcttaacccccagcctggatgatgcccagtggacattgagcctgggagggccctggaagctgacttgcatcctttccactcatgcctcctagtgtttgtaaagtgcttaactttttacttctttgcatgcagagaatcacaatgctgtgttttccgctgctggttttaaagacattcggtcctatcgctactgggatgcagagaagagaggattggacctccagggcttcctgaatgatctggaggtgggtgatttagaggaaaaagtagagaattgcatggtgtcaggaatctcaggcaaagtctttggaccagttgctaagtgaaggagtctgagacaccttccccatacctgatggtggtttctgacatagcatgtaagagagagggcacaaaagagacatgaaagagtgacaagaatatggttgccctttgccctccatcactgaccaatctgctgctgactctgtctcccaatattcccatcagtgtcagagctgacatagcttccttctcctcagaatgctcctgagttctccattgttgtcctccacgcctgtgcacacaacccaactgggattgacccaactccggagcagtggaagcagattgcttctgtcatgaaggtaactgccccttcagagcatctcttaaaraatagtatatattcttatttaatgtatktagaagcaatacctgtttgctgtttgctgaggaattaggaaaatggagaaaagtccaaagaagaaaataagtattaactgtaaattttattacctaaagaaagatactgttaatgttttggtagatagaatgtcagactgtgtgtgtgtgtgtgtgtgtgtgtgtgtgtgtgtgtgtctagttttatgtatatgttttacaaagatgagatcattttgtctgtactgttttgtgcaacacaatttgtttttcattttcacttctttatatacatgtcattgaatattttgcagcatcatttttcatagctatattatattcctttcatggatatgtcatattagggatggggtaaatcatctgatgaatatttaggtttacttcagattgcttgatctgatgaaaaattatgtaacaaaatttccttttattatttctttggcgtaactttctaggtgggaattcctagctgaaagtgtgtatattcttccttaacgagtttgtagaatacttattaaggaactgctgtgtattggacactgtgggaatacagtattgaatggagcagatgcagtccctaccctcaaagacagacagcctgtttggggagatggacgagtactaaggcagctgtgatgctgtgagatagctgtgttgacagtgttataggggggtacatagcccagactttgggcagtgtatatgtgggagttggcgggttggtggcaggaaccttcctggaagcagtggtttctatgttgagtcctgtaggatggggaggagctaagaaggcatcagcagacaggggttgacagggaagggatgtgctctgcagaggacggagcatggtcagaagccccaggcagacatcatggggagtgtgagtgatgaggctagagtgaataggggcagggtctgtgctgaggcttggactttattctcagggcagtgcggagccactgaaatcttggatgtcggggagtgacatgattggatgtgcatggtcttaaggccaccctgatgtcatagcagggaatgggtcagagagaggcaagactagacaggccgtgggagcagttaggagaccattgccatagcccaggtaggagttgatggtgacctggatgaagtaggtagcagtggggacagtgagatgcaaaaggatttgggagctctgaagagacaggactgatgagacttggggagtgccaggatgtgggggatgagctgcagagttaggagtccagattccccccagtcccacctagtcaagataaacctaagagatgggaatcaaagtacaaccaaagatttggacagttccggggagggaagtggtgtccactcagagagcacagctgtagaagcaggttccctgtggagagctctttgaggagatgagtgacaggaatggaggctactctgttcccttcctcttgagtacctagcagaatagcccatgaggagccctggggataccaagcctacacttgactaaggctctcacgccagaaattcacagaggaaaatccacaatgtaggacattgtctccttgcatcaaaagtaagccctgtttctctaagctgaattgggacactctaggacaatttacttttaaaaagtaaagtttacggaaaaggttacacttgttggttgtagagagaaatggatgtaaagtggagcttgggtgcatatagtcaagaaataggagaaatggacagcatttgaaattccctccaggcatcagctggggaaggaaggccggtgtctgaggttggtgccagaaggatttcctgccctgactcactttgcttcccygcagcaccggtttctgttccccttctttgactcagcctatcagggcttcgcatctggaaacctggagagagatgcctgggccattcgctattttgtgtctgaaggcttcgagttcttctgtgcccagtccttctccaagaacttcgggctctacagtgagtgctctcctgaggagttacagccccacctcctcgcatcactccctgcttcagcagccacagctgattctggtccctctctttagatgagagagtcgggaatctgactgtggttggaaaagaacctgagagcatcctgcaagtcctttcccagatggagaagatcgtgcggattacttggtccaatccccccgcccagggagcacgaattgtggccagcaccctctctaaccctgagctctttgaggaatggtaaggggctcccagtctggtgggccgggggrtggggagtgcagaacrgtaattgtcccagtacatttaactgggtctcttcctttcattttggcagaagcaggataaaattactttaacttctttgactctcagatatttgtaaaacaggggctgatatctacctcacacgtgcataacacaacacctggaagacaggagggggcactcgatgaatggtagttttccccaatttccccccccacccagtcttcctctccatgaagttggaaaacccaagaaggtattcccagcaaaatagaatatcgaacgtctaggcagtttaacagtttgggagctcttggtttttatctgtaatttacatacactttatcttattttagaacagtaatttttatatagtagctaaatctgcaatctttatttagtaagtcctgatgaaacatattgccctattaatatctatagcagcacctcggtgaagcctgagttgaaatgtgagtgtattctagccagtatacccaagactagcactagactcactagtaaatgcagtcctttccttctgccccctaagtctctctctctggtatgttaatccacccatccagacatccacatgccataataggcaggttatgatcccattgtcagctgtcgtttaaattagagtttttaaacctgtgtgttttcgggtaccatctttcctgtctggattggtatttacgtcactgtccatgcttcaggacaggtaatgtgaagacaatggctgaccggattytgaccatgagatctgaactcagggcacgactagaagccctcaaaacccctgggacctggaaccacatcactgatcaaattggcatgttcagcttcactgggttgaaccgtaagtggcccccaccacctccagcccatgcgtgcatgtagacacacaacattcctttcagtcgctcgccttgagctgagctcactttcacagcctttgcctaattgggcagccattgctttggaccaggacaagttaggttttcttagggtgtcccaccatctcataaactctctgggtctcagaagagtattgtggtctgccctgctgacccacagccaagatatttccgtgtttgtgggctgggaagtggctcagagccagctgggaggtaacaggattggtagctgggagccttaatttatgaaaggttcttataaatgctcaggtacattttgggtttgccttaatcctgaatataatgattattcagggaactgatttcttgacaggtctttcttatttctaggtattatcctcaaaaagagattacaaagttatctctgcatttcataaacaagaacctagattgggctgggcacagtggctcacacctgtaatcccaacactttgggaggctgaggtgggcagatcacgagatcaggagatcaagaccatcctggctaacatggtgaaaccccgtgtctattaaaaatacaaaaaaattagccgggcgtggtggcaggcgcctgtagtcccagctactagggagactgaggcaggagaatcacttgaatccaggaggcagagcttgcagtgagtcgagaccgcaccactgcactccagcctgggcgacagagcgagactccgtctcaaaaaaaaaagaaaagaacctagattggtggttggaattaaaagctgattgaaaatctagtaggtggtcatgcatggtcttggtcaattgtcagtagggcacatctgccatctgcagtcccatctgatgacagaagagtcatttcttctttttttttttgagatggagtcttgctctgttgcccaggctggagtgcagtggtgtgatctcgactcactgcaacctccgcctcccggcttcaggttattctcctgcctcagcctcccgagtagctgagattacaggcgtcatttctttagtaattcccacagtgcagatgtggcgactcacctgtgtgtcccagtgactctagggagggatgtgtggctggcttggtttgtaggcagaacggcagaggccgtggggaggtatttaactggggccatcacagtgccagtgtgaagtgggctcagaaaaatccaaaggaaataaatataaatggcagttaatagagcttgtattgtggacccctcaaaatactttggggtaaaatgaagctacctaagaaagtaaagaaatagctcagttagctgtagatgtcctcttgactgaggaacagagaattagttcactcacaattataaaaatattacatgtaacagaaatattaatagtctttagtagtaatagtctaaaagctcacaatatgggaatgtctccctgtaaaatatccatatcttcccattatccacaggaggaaattagttttattaatatcacgaattggaaaaatgatgagaatagaactgtgcttataacacaaaagttatatttttagcgcttggcatcatttgcccttattaaaaacaggggttttgttttcctcccaactttttttttctttttgagacagagtcttgctctgttgctcaggctggagtgcagtggcacaatcttggctcactgcaacctccacctcctggattcaagcgattctcctgcctcagcctctcaagtagctgggactacaggcatgagccaccacacccagctaatttttgtatttttagtagagacagggtttcaccatgttgaccaggctggtctcaaactcctgaccttaagtgatctacctgccttggcctcccamagtgctgggattacaggcgtgagccactgtgcctggccttttttgtttgtttgtttgtttcagacacggtctcgctctgtcacccagggtggagtacagcggtgcaatctcgggccactgcaacttctgccccctgggctcaggtgatcattccacctcagtgtccaagtggctgggaccacaggcrtgaaccaccatgcccggctaattttttgtagaaacggggtctcaccatattgctcaggctggtctcaaactcctgagctcaagtgatctgcccgcctcggtctcccaaggtgctgggattacaggcatgagccactgcacctggccagaaaagttttaaacatacagaaaagttggaggaattgtacagtgaacccctatatatccgccacctagtttctacaattctcacattacaatacttcctttgttatcttttttctgtcagaatggggcttttaacctggaatccctggatgtacgtttaggagaactgtgaagcccctgaaatgatgtttaaaaaattgtatatgtgtattttggccctgctctagggaaagagtccataacttttactagcttttcaaactgtgacacttcccttctctgaaaaagtagaaaggcctcatttttactaaaacaaaaccaaaagccagggtaggagtcatttaatcactgcctcagggcacaggcttttagaaagagtggcacacccagggctgtgttggcttgaggctctatccycttgggtgaccaattcacacaggtaaacctcttcttaagcttgctttctttgttcactggtttggaggggtcaagggaaaacttaccctttgccctctgaaagtttgctggaaatcagctgacaagaggcagattaataggagaaaaggcatacaaatttatttatttatttttgagtcagagtctcactctgttgcccaggctggagtgcggcgtcacaatcatggcttactgtagcctcaacctcccaggcccaagcaatccacccacctcagccttcgtagtacctgggaccacaggtgtgtgccaccatgcccggctaatttttaagatttttttgtagagacagggtctccttatgatgcccaggctggtcgtcaaytcctgggctcaagcaatcctccctcctcagcctcccaaagtacttggattacaggcatgagccactgtgcctggccagcatgcaaatttattaacttgcacaggtgtcttacaaaatagaactcaaataaatggccagatgattgatgcttttataccatcttggggttatagaaagaatgggagcttggagcttgccagaacagattatggcaggcagagaagagaaggcctggttagcaaaggtggtcttrttatattatgtagataagacaggtagcagccctcggagaaaatagcggtaaaggtctatttcttttagacctttaaaggcatcacactctcagttaatctcccctagatctggacaagggagggcctcagagaaagcctagctgcagccatgcagattttctctacagatacagatctctcccacaaaagacagctttgcagggctacttctgtatgtaggccctctcaacagccatctcaaaatatgtcaaagtatattttggggtgaactattttggtttccttcaaggagcactgagtccagggtccagatttttcacttccttagagaggcactgtagcatcacgggggcagtgtacagcccagacttgaaatcctgcctgaaaatcccacatccaccattgaccagctgtgcaatctcggaaggccatttaatgtctttatggcctatctgtaaaatgggcatgataaagttattatcaggatgaactaagatgcagtgcttagaacactgcctggcacatagtgtttactcctctgattatgatgattctattattattccatttcctcaggttggtggtatcttaaaggtactaattacttaagcaataattcactaaaattctttttttttttgagacagagtctcactctgtcacccaggctggagtgcagtggtgtgatctcggctcactgcaacttcctcctcttgggtttcaagcaattctcctgcctcagcctcctgagtagctgggaccataggcacatgccaccacgcctggctaatttttgtatttttagtagagactgggtctcagcatgttggccaggctggtctcaaacttctgacctcaggtaatccaccagcctcagcctcctgaagtgctgggatcacaggcgtgaaccactgtgcccagccaaattcactaaaattctatcaatggatttgccaaatagcaaaactgctttagagactgctgtataaaggaagtacaggtagtctcttcttacccacatgtgatgcatttctgaaaacatggaaaaactactgcatctgagagaaagctgagaaatgaacagaagtctgatggtgccaggtcagagaggtctgtgtcatttctcagctcattggttaattcacacaggattgatcaggtacctcatgcatggggccttacccaatgtattgtaaaaatgaaatgtcaaagggaggctgccgcgggtactcaatgcaagtccaggttagsgaagaactaaaggaagcacttcatagccagcatttcatatcgctgtccgtctgatggttgtttttaggtgataggggtgtcctggtggatataatgtataaggcttggttggaaggcaatctcagattaaaattcccatcagtagtagccatattgaattttctggggattcaaaggtgaactagtaagagtactttccagaatctagtgagcatatttttctgtttgtcagttggacaaaatagcgccttttgttttgcttctctctgttaaggggaaagaagtaaagctgtaattgtcatataattgctgagcctccactgctttaaggatcccctctgctctgattatgtcttcttttggttttcaacagccaagcaggttgagtatctggtcaatgaaaagcacatctacctgctgccaagtggtcgaatcaacgtgagtggcttaaccaccaaaaatctagattacgtggccacctccatccatgaagcagtcaccaaaatccagtgaagaaacaccacccgtccagtaccaccaaagtagttctctgtcatgtgtgttccctgcctgcacaaacctacatgtacataccatggattagagacacttgcaggactgaaaggctgctctggtgaggcagcctctgtttaaacyggccccacatgaagagaacatcccttgagacgaatttggagactgggattagagcctttggaggtcaaagcaaattaagatttttatttaagaataaaagagtactttgatcatgagacatakgtatcttgtccctctcactaaaaaggagtgttgtgtgtggcggccacgtgcttctmtgtggtgtttgactctgtacaaattctagtcccaaagatcaagttgtctgaaggagccaaagtgtgaatgtgggtgtcggctgcrgcattaaattcatcatctcaacccagagtgtctggtctccctgctctttctgcatggttgtgtccctagtcctaagctttggttctttagggtgactgtggtaagaaggatatttaatcatgacatgcacggacacrtacatatttractgaaacaagttttaccaaacagtatttactcgtgatgtgcgtagtgcattctgatatttttgagccattctattgtgttctacttcacctaaaaaaataaaataaaaatgttgatcaagacatggagttgattttatgaccactaatgggttgtgacccacagtttaaaatgaatgctttagagggttttactagtggctaaaggaaaaactacaatgtgttcttacagtatagcttccttcagtgaactcaccatataactccctggtgattttgcgggcttgtcatttggaggccagctgtcttatgttacttaagaaactggacttcttggactgtgagaggagatgacatcactcaggttgattatagaacatcagcccgttccctgctgtcagagtccctcctggtttattgaaacagaaccacaaaaacatacatcacaatttccagagtccaagggccgctccaaatggccattttgtagaatttggtggggtttgatgttacttaacacaagaggtctattaattggagtttttaagtatttaaagttaattcttgtgattttaataggatctgccactttctaggactcatttgggttgttagaaaatcctgcagtcctgagggatgactggggcctcagaagtcatcaagtcctgcctctccgccagtgaaatagtctctccatattgtctctgactcatccatttcaactggtggggtggtagtggtgatggattctttaaatacctggtgaggcatccccttctgctggtggggcctcttaattaaaaaaaaagaggctcrtttaccttttgctcacggtaaaagttcatctaccttgaaccagaatttgatctttgttccactcccctgcccctcctttccttcctttaaaccacagatagtaaatctactggcacttctaatctaccacctttcaaatatttgaaagtagcagttgtcattccttgtttacacttttccacatgaactgcctctcccccaccacttttgtttctgcacaggatgtggtttccagatccttccctgtctggctggagccccaggagttcttcagaggacactcactctgccagtgtgtggttgggctggtggaagttcatgagtgaatgtgattagatgccctcccacccatctcttcacagctttctgaacatatcagtctttgttctcctcccaatgtaaagatgcttgttgttagtaagggaaggcagccaacagagaagtcgaatgattctaccttctgtcaatctgccattctctccaaacgctttcaaccactcaytctccatggggacgatactgcctccatggggacgaaaattggctctctggggcaaaaaaaaaaaaagcctgaaatactaaaatgttgccttccaaagtgcaatcctacctgaccatcttattagtatttaatttctcttgttagggaaaattaaaattttctctttagggggctgccaaaaccattaaagataaacacatctttaaatctaagtgacagtaccaaagtgctcaaatgtttttagccttgaaaaaagcccatctcaatgggaatctggccttcttctattccgacagatatgttggttggtgtggttcccactgcgttcacctgaaaaagggctgtgagtttgggaagccggcaggactcctcaggcctctgacatgccagtgaacttcagaggtgggattgtttcaccaattttgctcactcaagagcagggyactccaacctccaggctctgccagttcccaggtgtgtaaccgtgagcaagaagacagtaaccttgcagacagtaacccctcctccacagggtggttgagaaagaaatgagctaatgggtacttaacagaatacttggaacataaagcccttggcaaaatagttgtttccattatttattattaccgttagtgaaatgaatagcctctactgaggttcctgagaagaatcttaagaggttttggcataggcccctgatcctcctgtttgctttgagaaatgagtagtaggtgtcagatttcagccttccttccacacaggtattatatgcccaaacacatcttcccacctgcctggctgttccctccctccagcatcggcttaaaactgaccaacaggcctggcccattcttgtgttccgttccctagcctttggttgcaaactgccagagtcatgccacttggactcctttctgaaggttctgcagaagcgagctagtgtgaccaacattctgtctcaggggcttgtctgggtttagcccccaagaccttgaatttggacggcacccagcacagcacctcacccatcacatgggttcagcaaatgccagcccttctcactgtcgtcttagttccttcctcgtctttatgcatactggcttctcatttgggttttacttctcatttctggcatwcactcctgcaaaatcttaccatctggcctcccaaagtagtgtgccaaggcttccccgtgacctcaccgcagcctcacacctggcccggagcggcatgcctcttcaggcaggtggtgcacaggtgagatcatcacacgtgggcatcactcaacctgcatctcaaatgaagccacgtcagaagattccaggggcaaggaaaacagccacattccaggaaaggcattttcattttatttaaaaattatttacaatttattaagccttcataaatgctttattttaaaatcttttttttaaactttttttttaacctgaagaaaatctttgtggggtgggggtatatagggaggggagtggtracaggctccatagggattttgcaaagggatgggtgtaatgcaacagcagtggcttgagcctggtggcctcaggtgatgaagaccagccaggcaggcaccccggggccagtggtcagctgggcaagaagcctgcatgatggtagttcttgttcaaaactcaccatttattggtttgggtctaagtacccaacattgagggctgacacttcgcctgttcctaccaggcaagagcaggtgttgggactggatgactgtgaagttatctacgagaagtcatgcactgctgagcctcaggccaggccaggcaaggggtgtggtgaagtcaataatcattgctggaaaaggcatctctagctccaaagtctttacttccacacgctgtggccctcctgtctgcaacacctgctctgggttgttggggaagaggggacaaagttatgtgggggtgttggttgtacaatactctagggtgtgccgagaatttctgaggacttccacttcttggtgggtgccagccttccccatcaattgatggacatttgaaaagaccacttatgattaaaaacctgtctcgaactgcccagtatccacttcactctgcattgcagaaacgctgggctgaaagttccactatttaaaatagtagtgtttttttttgtttgtctgtttgttttaactctttgtaggtctgagacctttgagaaccttatgaaagctttaatgctctggaaaaaacatacaagaataaatacattaaatactgacagttttaggggtttcatagaccctctgaagtccaactatggaccccctggggtgatggaccccaagttaagaacccctgagttaacagttcctgtgggtaagcattttcttttgagatgcagataacccagaggaatgatcagtctccctcctgcctgtgaatgactcaatgggtgtggggaggtgggagggagggttttggaggaaggggagggaagctggatggtatactacggggaaaggtttgggaatggtttggagatttagcagacagcactcgatcaatgagttcagtgagtacttgactgagaacatctaaagagtaggagacagatcagaaagggagatagttattctgaagacaaatttcacttacttccaagttttccctaaggctggctgtggttgcttttcttttcttttctctttctttctttcttttttttttttgmggggggagacagagtctcgctctgttgcctaggatgaagtgcagtggtgtgatctcagctcactgcaacctctgcctcccaggttcaagcgattctcctgcctcagcctcccgagtagctgggactacatgcccaggagagatggggtttcaccatgttggccaggctggtctcaaactcctgacttcaagtgatccacccgcctcggtcttccaaactgttgggattacaggtgtgagccaccgcgcccggctttgcggttgcttttcagaactgttttattcttggaagcaggtatgcgcggtcactctgccatctggtggttatgcttggaattgcacctgccccaacttcaggagaaaaaccagagatccagtaagttcttggaataaagtacactcagctgatctgctagggtgtagtaaggggrtgggagaaggacaaatgcatgaaaaagaagaatgattcttcaacattcctgtgtaactcccactgaagtcccatgagattatgtatctttcttggctgrcctgggcactctttggtttgtcatggctaaacttgctttcagcacttacagtttttccatgtaagttttgtttgttttttgctttgatttgcacttaagacctgaagttccatctctggctcccagttgggtctctctgctccctgttccttctcttccagagcagaattattgatcgattgaagactgctgattgrgagccaaaacagatgtgtccctggtaaaaacagtgacttgaggttccatctcacattctttccattccagctgagacatactgccccaggctgctggaacccttatctaacaggaaaccagtcactaacagttttctgtgctgtaatgtcaatcacgcgccaacatggctgagtcccacttctttaaagctctgggggaaattcttggtccatcccctgaactaatcttcagacctcctactccagcctcccatgtgcctgtctgccaatggcaccttctgagccaagctatgcatgaaatgtgttagaaagttaacattttgttctggaggaaagaatggcaagttccaagacgataggtctcctatggcatcaggggacccaaagaacaaagaagagcatcaggggtcccagagtggcattgtcagcttgcagtcagacatctcttttccagtcccagactatgctgtggaaaagaccatttctagcatgttctatcagaggcacctccttctgttatggccatgtcaaggttctgagtcgaactggaggtaacgagggaaaatctgccaaactgacagctaggggtgaagagatggaagggaaggcagaacattctgtcacctgtgggaggccttgggggaagcagatgatgggagggtggattctcccccaaagctctggaatttcacacacccagtgaatgctggctttgccctgtcatgtgatcagaggtgttaaattggagttgtcctcagaggttctctctccttctggtgacctcttccttttttggccacctgaaaaaaacaagttgcaagtatcagcctgtaacactggaggaacattcataattgcttggcagtctgagttcttttcaaaacagaagcagaaatggagacaaagcccttgacagcttggttagaactaaccggcattgtatgctggtgctgatattggcatatttacatcttgaaagattaggacgtactttccacataagatgccatctctgaaaagtcacaaacccaggctggtgcctggaattgagacttcctggaggggactgagtaaagcccatgtaacacctcaggcccatgcctcctgcgccccttgggggccagcccctctgactgccagacaccctcagagaggaccaatctcatagactttgatgtcccatgaatcagggttggtggctgtagctgcaagccatttccagggacctgcgttctctagctctgaagcaacctcccttctgcagtggggcaggtgggcataattacatagttgtcctcaaggatgagagagcaatctgttcccaggtctgtttttaggaaggaatatcttcaccttgttctctccaccattgacttccatctgtggaggagattgctctctttctattgagtctcctggacaccaattctttaaaggactagacagaaaatattagaggcctgtgggccatatggtctctgtcacaattactcgactctgacattgttgccatagataacaaatggatctgtctgtgatccaataagtccttacttacaaaaacaagtaaaggagggaggtcagaattgacctgtgggcatggtgtgcagacttctgtcctagaggacaaacaactgaatgggacakatcccaaaactatcaagggtgcagtgctggcccaaccccttctgcggatttccacaattgtacctcattagggtttctaagaggagtccayggctcctcccccaagaggaagatgctaacatgctttycctactaaccatcagcagggtggctctcatttgggtgaagaactagctactcactcaaggttctcagcagcttcttgcccacgttttcctcaaaatcgctactgcaggggctggtctctgtatccaggttgatgttacaacattcactatctgatgctgagaaaggaaaggagagaactcaagttgtctcaacctacacactcaggcatcaagagagggtgattctgagtgatgacatccctcagcaagtgaagtttaagaygtgagccaaggtgagggtggtgtaacaaggcagggacgcccagggaagtacagggtgtcattagttagcaagaggcattttagtgccacaaaaggaacaaaaagatggagaacaggagccggaatccaacgatccatgcaaagtcagaaatcattccctcttctcaaacactgtttggcaagagagagggtttagagaacaatgtgttctccacccagtctatttgccagactaaaagcacacgtgaggataggtggaggtctccttggtatatttgcacaaaccctggaaagccacagggttcaacaacaatgcccctgtcttctcccgcaggactcaatgggaattcaaagagttacagaatctgagagcccagaaggggccaagccttaccaccaatgcaaataaaaacctaaggcagagcggtgtgttggaaatggcactgcactgaagccatgaggctgagcctgcttctgatgcagtttttggacttgagcaagttatttcccttctctaggcctccagggtcctcaaatgtcacaggacgagggtggactagatgatctccaagaccactccatcgccttcattcttattcctttgttacattttcttgctatgtgctttagctactagatttggtgttgggggcagaaaaggaacatcagttctaaattcaggtcctggaacagtgactatgtatgtcccagattttctgggtcagccacaagttcaaacatattgtcttgttgactttaaattttttttttttttttttttttgagatggaatctcactctgtcacccaggctagagtgcaatggcgccatctcgcctcactgcaacctcagcttcccaggttcaagcgattctcctgcctcagccttccgagtagctgggattacaggcacccaccaccacacccggctaatttttgttttttttagtagagacagggtttcaccatgttggtcagactggtctcgaacccctagccttaggtgatccgcctgcctgggcctcccaaagtgctgggattacaggcatgagccaccgtgcccggccaactttaaaaatcttggagcactttttcaggttgttgctctggacttgagaggtcttatactatggactgaagtaggtctgacaggtcgggtgggggaactgctggcttgggtgcaggcatagggggctactgaaagcttggggaatacatcttagtgaggcaaacacagaagcttctcaagactgctgggaccctgggagctcagagcaacaccactgtcaaggcagaagtgttcagtgtctcagagggaggtgatatggtcttagacctcaggaaaagtcttataggctacacctttggtcaaaaccacagctagttagaatgatggctgacatcagtttcctaatctgtaaggtaggcctaataatagctatgtaacatttataaagcatggtactgaacactgtaatatgccttttatgtatgttatctcatttatactcaaagctactttataagatagctgtcataatttatacctattaacataaggatacttatccattcagataaaaaaaactgagtcttaggttcaataacttgcctaaaattgcataactcctaaacgaaggagccagggtctgaatccaggcagaaacccaactcctaatactgccctacacagttttcctaggagaatgaatcagacagggcctgatgcatggtagatgctcagtaaatgtttcctttccctggctgtgtaaggaggtcggaggtttaacgcacgggctgcggtcccagggctcccctcagccagctttccctgggccatcccagtgcccaaaggcaatgatctcccttgctgcactgggcccagctggcctccctgacctgctctcgtgggaacggctgcaggagacagcgtgagctgctgtgtgctgtgctcctcgaagtcagtcatttcttcctgggtgaaggccagctcctccatcctcaggtacactacctcgctggggcttctcagcccgtctgagcggctgcctggggaggacagtgagtgcatcacctctctgctttggagaagmcccagggctcaggtggtgtgagccctgggaagggctagaagaggaaggcagggtcatcctcaccccacaccagcccagcctgcccgtctgcccagctgacttacacggcaggctgttcctgttgttgaggagcgtgatggcgggrtcatccttaggggtctggggtgtgcccygggttgtgggggccttagtggagtccccgtctgtgaaggcctccatgtcaggggactgaggtgagctgtccatgtggcaggcagtgagtgcgttctgatattgctgccgtgtgatctggaaggaagagggcaggagcttaggagcagctaggcagagaccacccggatgcagccagccttcccaggctcgggggcagcctcgctggggtgcttggaaccctcggcctctgaggcctgagatccacgaatgggggccttacccacgctgtagcagtccagcagggacagtgaggcggccctttgctggtctgccaccagctcccactgttcatttttattggcacctggaagagccaagccttctgagaccctggagaggatggagggcatcttctgagagcagggtggttgcccatggagaagtttaaaacacccatttatactattgccaaaggcccaaagggtcagtcgggggtgacttggtgagaataaggtaggactccagcagggaagctctcatgccctaggtctcagtgtcgggaagctggaggctaaggcctgagagaacacaggcatttctgatttggactaagcccatccctggatgtagggtcatgctcctatgctggctgggaccacagcagggaggtttcccagctgtctcctcaaatcacaggagtcagacttgtgactttcctgatgtgtcaaacacccacaactgaaggcatccggagggtcaggctgcagccagaccagacaggagtctccacgattccaggcaggaaaaatatggatcaaatatctcttctaaaaggcaggagggtgtctctgtcacccctgttctctgggtgtacataacagactggcactgtgaatccttgctagcagtgaaaacagactaggttgtgtgccacccagtacaggaatgtgaaaccactcatcagcggctggcactgggggaagaagggaaatggtacatggcataatatccttcccaatcataccatctcctaaagcgttttcatccctccttcactgcattagcgctagtgaacggacaaaaccacaaattctgctcattttgccttctctttcctttggggcagaattggtattacacgttgaaagagaaaagatttctgctggaaataggagaggggatggttaaggctgacatgttgggaaagagagtaggcttgaagttggctttgtatccggcaaggtctcaacagtggctccttgtcaactactgacaagacgcattattttactggacacgatcaatcctttctttaaccaacttcaggatattttgcaagagaaccaagcaaattctaagcacaaccaatcgaatcacaaaacaccagttaagaatacgtgcctttttgcagagcatatgggacacatacatgcagagattccaggcttctagttatactactgcccatttgagtgggcaaatagagttttctcttgatggtttaaatcagtgattctcaaacctcagcatcagaattatctgaaggacttgttaaaacaagatttttgggtttaactctcagagtttctaatttactaggtctggggtggagactgagaatttgcatttttagcaagttcctgtgttcctggtgctgctagtctggagatcacactttgagaactgctgacttaagacctagttaaaattagttacaggtactactcaggttttggtttttttcttctaaaggattttacaggacaaagcagcaaagtgttaacaactggcttcgatatttttcaggtcaaaatggtatattccatgctttatggcatggaaccacaggtctccacttagcatttatccaaagtcttcaatcgattcaatgttcttgttgaaaacacctgacttttgcaattccctctgttgggaagtgagaagtcaggttccaaaatttcccccaaagatgaggaaatttggctctaacaccaaaggatgggaaaattccctaaatgacacttggtaagcccagtaaagcagttgatcttactctgtttgggttctttagttatttagatttggcttctagtttagtcaaaggccaaatgtcccttcacctaagaaatatggcaggaaacacagtgccaagaactgaagttcaagtcccaattttgccactttcaagctgggagaccttggccaaatacatatacatttttaatcagccaatgggcaaatgaatacactggccacattgttaacctctctgatcttataaaagaggcccagagataatgagataacatgagtgaatccattatatgaaactgttaggaatggttgtttaaaacatgcccacatgcatgtctcaccatttgactttataatgggcatacatttcaaagacagctgtcaagcttaccatctcattatgtctaaattgctgatgccacacacagggtggaggtgggggaaggagcagtgtcccctctgcccccaaagtcagtgtgactggagattctgtgaaagcaagactaggtcttggaaaaataaatccttaatcaagaaaataaagcaaaagggaaagtaggggaaggaaggcaattccgactatggacagtggagaagcgggacagaaggaaagggacagtgagtgaagaaaggagaggaggaagagagaaggaaggggctgtttcagtaggctttgaaatggatttcctggctcagggcccctataagttggtagactggctgcgtcccccaggctggaagtctcttgggaatgactactgttgcaaaatgctctatattatttaactaatttatttttggaaaagttctgcccagattttatcttcagtgagttgtaccactctttttttaatttttttttttttttgagatggagtctcgctctgtcttgcccaggctggagtgcagtggtgcaacctttgcctcccagattcaagcaattctcgtttcaggctcctgagtagatgggactataggtgcacaccacgacgcccagcttatttttttgtatttttaatagatacggggtttcaccatattggtcaggctgattttgaactaccgacctcaggtgacatcaccctcctcagcctcccaaagtgctgggattacaggtgttagccactgcacccggcctctttttgtttttaaaaaacaatgataagcccctcttgttacctggaatcaaggatccaggaactctaaccctctttttaagcattgtcagggaggaaaggacgggaagaaagtatttttggtaacaatactgagtgaatgggacacacttcctcgtgaggtaccgagttcctcatcattggaggcattcacacagatgttaagccaccacttgtcagtgatgctaaagagaagattcagacggccacactagtgggaagaagcacggcagtgtatggcagtgagggtggggagggggaggggctggagagggtctgcactgttggtgggtgtttatataaaaggaaaggtaccacccaatggctaaatcctctatgtgactcacagccttaacagccttgctttctttcacacagctctctttttaaaaaaaatttttttttaaatcatgaactcctgccatgtcaatgtgttgccttaaaagaaattgttgacaaggtgccaatgtatccagggaagcaactctgctctgcctctcccagaggcatttctaggttcgggtatcacttcttgtcagttccttccccttgttcaacaactcatgacaacttattttaatctagcgtaatactgttgaagagaaatgtaacgtgagtcccgtcggtaattcaaagttttctagtagtcacattttaaaaagtaaaaacaagttaattttaataacatatttcatttaacccaatatatccaaaataatttcacatcatcatgtgattagttaaagtgattagtgaggaattttacattctttttcgcactggtcttgaaatacaatgtgtattttgcacttatagcacatcagttggaaagagacacacttcatgcattcaacagccacatgtaactaaatggctgtatttatacatggctactggctgctgtactggatggtgaaggtttagtggacggcctaaacagctgtgcccagtttcgatgacctggcctcgcagggccaacagcactcccactactcaccaggacagaaccactggtcccacccagcttctctctctacccagtccctcgaatgcgccatgtctacttgccttccatacctgtttaagggtgtccctttgcatggcattgccttaattctcctcttgttctttccaaactcctaaagtacattctccagccaattagtgcttaaaaaattccagatagtggctcacacctgtaatcccagcactttgggaggccgaggcgggcggatcacaaggtcaggagttcgagatcagcctgaccaacatggtgaaaccttgtctctactaaaaatacaaaaattagccaggcgtggtggcgcatgcctgtaatcctgactactcaggaggctgaggcaggagaatcgcttgaactcaggaggcggaggttgcagtga

SEQ ID NO: 94284 - DNA, 43815 bp, Homo sapiens
gtgtattgatgtgggaaggagataatgccatgcatttatgagcacatattagagggtctgagacaatgcatgtgataaaaggtcacctaaggaagaaaaaaagaacaagggaagacactggaaagaacgtgatgctgggagtccctgggccaccaaagtctggagaaaagtggtaaccacaaggctcccagcctagtttcactgaagacctcgacactaggtgacttatgggatccttggtaggacaagccttgaaaagttttacaatagcaaatgtggacgttgtcagaaccaaatgatgtcacgtgtgtatttgtgtgtgtgtgtcagtgtgtgtgtttaaaaatcatgacaaataaagcaggctgtgaagaggggattcccatgctcgtgtgcctgataacacaactatcacaaacgctttgcgaaaccacaagtttgcacaaaggcaatcccaaccttacacaaaaatatttctgcaagggcacctgcccagcgactgcctgtccaaccttggtgtggtgtcacccttgttattgatcttttagcaaaggagaattatttcaaaactgatatgaaatcctcctcatattttccttggaacatctttgtcttgctttacctccctgaatttccacatagtttgtaatggtcacaaactatgtgcatagtcagcaatacattttttgtttactttgatgctacagtttctaattttgctttatttaatgcttctcaatatgcttgtttaactgttgcagatcccgctgaaattacgcttaggaggacttcttcaaccagaaaaacccattgttctaaaggttgagtcaagggatgggaccgtaagtggaacctgaatttccctaaggacttctgctttgctcttcaaaaaagctgtgacctagaacaccagagacctcaaattactttgtgaatagtaccctgaaatgaagatgggcttcatccactgtactgcataaataaccagggattctgtacatgcactgagctctctccctgtctgtgtagagtgttatacttgggaatataaaggaagtgaccaaatcagtgcttgggaagtagatttggcttctttgtttctcacaggacaatctcagccacccctagttagcaccattaactcctcctgagctctgataaaagaatcaaaatttctcaataatttcatccaaaattattaatgaaaataagaattattttgatggctctaacagtgacatttatatcatctgttttatctggagcattctataataagtttatattaagcaaatcaataaaaacctcttacaaaagtatcatcggatactttcctgaacattaaggagaaatctatagaactgaatgaatgagaaccaacaagtaaatatatgtgatcattgtaaccattgttggtgtggggcatttgtcagaactccaatgtgattattaacataggtgagaattaatccactgtgactttgcccattgcttagaaagaacattcatagtttaattatgccttttttgaccaagcacagtggctcatgcctgtaatcccagcactttgggaggccgaggtgggtggatcacctgaggtcaggagttcgagaccagcctgaccaacatggtgaaaccccatctctactaaaaatacaaaaattagctaggtgtggtggtatgcacctataatctcagctacccaggaggctgaggcaggagaatcacttgaacctggaggcagaggttgcagtgagccgagacgcaccattacactccagcctgggtgacagagtgagattccatctcaaaaaaaaaaaaaaaaaattatgcctttttgaagcacatacattttataacatacaactgaatcccttattatattattagttttgatttaatgttttcaaaccatctcccctgatatttctgggagatgggaaacatgttttcttacacctcttgcattccattctcaactcccaactgtcttactgcaatgaacacttaataagaaacagtcaattggtcaattgattgggcaacaggctaaacacactcattccttgtctgttcccacttctttctttactttcccttcctgagtaacttatcctaaagtcattaggtgggtggcagccagatggtggccacacattaaggtagaaaagagagtgtcatgatggttccaagtcagagacctagtagggtgaggatcaagtaggtgttcacgtggagaaacagcccggcctgtgtgtgggagtccaagcaagcagagaaaatgtcgacacagaggggtggcctgaaaaagcagccagagcctaaacagggcatggagaacatatttagggcatgaggtgaggagggcatccatgagtgggaagggatgggtgaggtttcactacataaaggggattgatgaaataagtaaataaagtatactggaagccaggtgtgtcacttttgcagaaaagagtcatggattcagaaagggagaaaactagcaggaatcctatgaaattagattaaaatggatgtatccatgtatattcatacccttctagatagataaatggttagataggtgataaaaagataacaagaggacaagataattagatagacataaatgtatgtatgtgtttgtgtgtgtgtacaaaaaaacatatactccctacttctctccactgatagggctaggtaacaatggcatttcaatagcaatgagcacacttagtggccagatcttggcttattaataccattttccactgaaaggaaccagagctttttagagaaatggctgattccagggccaggattaagaatgttcaagataagcctaggatacattttgtgccaggaagcaagaagatgttcaaatgatttccaagtaatgtttggaaatgatatttgaaaatgatttccaaatgatatttccaaatgatttccaaatgatatatggaaacacttaaagactccactaaagaactattagatctgataaacaaattcagtaatgttgctggatacaaaatcaacatacaaaaaccagtagcatttctgcatgccaacagtgaacaatctggcaaaaataaaaaatgtaatcccatttacaataaccccaaataaaactaaatacctgggaattaacttaagagaaagatgtctacaattaatattgtaaaacactgatgaaggaaattgaagaagacacaaaaaagaaggatattccatgtttatatattgtaagcattaatattgttaaaaatgtccatactacccaaagcaatgcacagattcaatgcagtctctcaaaataccaatggcattcttcaaagaaatagaaaaaaaaaaaccctaaaatttgtatggaaccacaaaagacccagaatagcgaaagctaccttcagcaaaaagaacaaaactggaggaatcatattacctgacttcaaattatactacagaggtataataaccaaaacagtatggtacttgtataaaaacagacacagaccaatgaaatagaatagagaacccagaaacaattccacacacctacggtgaactcattttcaacaatgttgtcaagaacatacactgggggaaaagacagtctcttctggtgctgggaaagctggattttaacatgcagaataatgaaactagaaccctgtatctcaccagacacaaaaatcaaatcaaggtggacgaaagactgaaacctggctgagtgccgtggctcatgcctgtaatcccagcattttgagaggccgaggcgggtgtatcacttgaggtcaggagttcaagaccagcctggccaacatggtgaaaccacatgtctaccaaaaaatacaagagttagctggacatgctggtgcgtgcctgtagtcccagctacacagaaggctgaggtggcagaatcacttggacccaggaggcggaggtggcagtgagctgagatcatgacaatgcaccccagcctgggcaagagagtgagactctgtcagaaaaacaaaaaacaaaaaaacaaaaaacaaaactgaaatctgagacctcaaacgatgaaactgctacaagaaaacattgtggaaactcttcaggatattggtctgggcaaaactttctgaagaactaccccacaagcacaggcaaccaaagcaaaaatggacaaatggatcagatcaagttaaaaagcttctgtaccacaaagaaagcaatcaacaaagtgaagacacaaaccacagaatgggagaaaatattttcaaagtcacactctgacaacagattaatagccagaatacatgaagcgctcaaacaactctgtaaggaaaaatctaataatccaatcaaaaaatgggcaaaatttgaatagacatttttcaaaagaagacatacaaatgccacataggcatatgataaggtgctcaacatcactggtcattagagaaatgcaaatcaaaaccacaatgagatatcatcttaccccagctaaaatggtttttatccaaaagacaggcaacaacaaatgccagcgagaatgtggagaaaagggaacccttgtacactgttggtgtaaattagtgcaaccactatagagaacaatttggaggttcctcaaaacattaaaattaacattaaatagagctaccacaatatccagaaatccccatgctgggtatatacctggaagaaaggaaatcatatattgaagagataacatcactccaatattcacaatagccactattcacaaatgccaagatttggaagcaacctaagtgtccatcaacagatgaatggataaagaaagtactccaattatacacaatggagcacaattcagccatgaaaaaagcatgagatcctgttatctgtaataatatggatggaactggaggtcatcatgttaagtgaaataagccaggcacagaaacacagatattgcaagttctcacatacttgtgggatctacaaatcaaaacaactgagctaatgtctgggccttagtcagtgttgtacccaagtactgggagcacagcttttaaaatacatcatgaatgctttaatacaggaatgaatagatgagaggcacaaactggttgggtgttcttctgatacacagtatcttccttgacagattcagtacaactctcaacaggtaagtctcttcatgttatgttaccttatgaggaattaagtggcagaacatgatttctattattttcctttgcagaacaagaccaactttattagttgggacacagtgtggctgcatttgagtcccaagcaaccattagtctattgctatcaccacagagtcagaggggatgagacgcccagcaatctcacccaagacaactccaccaacattcctggttacccaccatgtgtacagtaccctgctaggaaccagggtcatgaaagtaaataataccagactgtgcccttgaggagctcacctctgctaagggaaacaggcatagaaacttacaatggtggtagagagaaaagaggacaataggactgtgtgagggggataggaggcacccagaggaggaaatggttacatttgtgtgaggaggttggtaaggaaaaattttagcagaaggggtctgtctggctgggcttggaaggatacgtaggagtcatctagagggcacaggtacactccaggcagagggaatttcgtgggtaaagatgtgtaggtgtggcttgtgaggatggatttcaattattctagaatgaaggcagccatggaggggcaggtgagaggagggttaatagatttcatgccaatggctccacttgagtttctgataagaacccagaacccttggactccccgataacactgattaagcttttcatgattcctcatagaacatgaactcaaaagaggtcagcaaaggggtgtgtgcgattctttgctattggctgcagctatagccctgcctccttctccagcacataaatctttcagcagcttggctgaagactgctgtgcagggcagrgaagctccaggyaaacagcccagcaaacagcagcactcagctaaaaggaagactcacagaacacagttgamgaaggaaagtggcgatggacctcatcccaaatttggcggtggaaacctggcttctcctggctgtcagcctggtgctcctctatctgtgagtaactgtccaaactcctctctttgtttccttggacttggggtgctaatcrggccccttttcccttatctgttttgaagatcaaaagagatgttcaaggagaagtagctgaagtgttggacgctacaaacgcatagaagttattattatcttatgcagatctatgaatgaataaataagcatttctcccatccaccttctaattttggtgactaggagggtttagggacagcatttggtagtgrgaatgrtttgattagcttagatctgacgaagactaatcaatgaaaacatggcagcggcagattacaaactgctgatcatgatggacagtgtgatcctcatccccttcccaggctctggggattctgggtacaggaaggagtggcttgcatttttgtctcattaattcgctttctgggttctgtgtctgctggaagggatgtgtagctgtattgcccctgtagacctggttcctgctcccccgccttccaacccaggatatcatttacataacgcaccaggggacaccaagacttcatgggaagctgtcccctggctcttccctctttcctgtgccatgcccctgaaaatcccctccctcctatgagtcactcctccaccctgtcatacacaggatggtttatcttgcaatgattaacctctagagcaaaggagacctggaggaagtttcgaggatttattctttgctttaatctttttcctcccgtctctgggaggctaggattaatatagagctttgtttctcacctaatgggaatctactagcagcctgaaaaggcaggagccatgaaagccaatttggattttacatatttttcccctttatgttacagtacaggagggcaaaccctctcactggtgggattcctggcatcctagagcaggtggagagaagagttactttccactgtgggtagtggaggctccacctgtcccattaacttctacctcaatttgacttttattaagagcagggaaccacaatgacatgaaaatagacactataaacctcattttaattctttcacagaaagcttaggaattcagtgagttgtggcaacatggtttccattgtctaacatttttaaatgaattgatatggtttaaattcattcatttttaaaccagaattttttggagatagactatttccagcatgttccttctggatggtaaaacagggctgttagttcagtatttgtgacaataagtgtgtgtaaaataatgtcacctttcctgaatgtcaggaatatgagtctaatgcacaaatgtatacctctaagacaagactgcacgtcttttcaaatatacctgtccggccatttattttaataactccttttcgaatatacctgcttagcagattgtcttaaactctcaggacaggggagtaagcaagactgtgagccagtgacgatagcaaaggcttccaggtaggatccatatgaagtgagaaaatattcctcagctctcagggtagaactccaaagagatattcatgggtcctggccccaccgtggaggtcactcaaagggcaaacaggttggcatctcatctgcttcaagcctggacacaggggcaccatctgtgtcactctgtgtgtggtctgccatgttgtgggccggtcactacagactcgggcagccaggcagacaatgccttagccttagacaatgctggtgcagcccaggagtcagaaaatgcagtgtagaccaggccctccttaggccaacacaattacatgcaatagatgactggcttttctgttagtctcttcactggacccaaaggctgcattactctaccagaggggagctggaaagaaactaaagagttcgcccagcacagcatctgccttgacatggtaccatgtgaatctagacactcaccaagatctttccttgggggccaatgctgctgacacattaactcaatagcttgtcctcacctgagaggtcaggtaatgtgtttaaagttcaggagcagagattagtgtcattgatttgacatggctgtgacaacaaaggagggaactgaagtgggaatacccaaggccaccctggctttggcaggtggtgcacgcacttccactaactgttctggggcagggaaccaaatgtatgactgggcctgctcatgctgcccctgctgagtcctccaaaccctgcccttcatgtaatttctcagttttattttatcacattttataagtcactggatgtttacaaaatgtttggaacctatactgccttgaaggctaacctctaaagaggagtaaacaaggtcttaatacaactctccgggacgttttatcattacttatcttatatgccatactgcaccatttgctatcaacaggaaagtacctggactttggaaggtccctctgtgtcttttagctgaaagtacatatgaggcatgtggattcttttatgcacatcatctttttcagccacatttttgtagtttgcctctctggagccaactgtgtggggctagcagcttcacagctgaatcagtgtctggcaacctcttccttcagcctctcttcttcctccagttttccatccctcagtcacaccggagggggaaggtctgcaaggatccagaaccatcagttggaggagtttgcacatgactcatgaaagatgagttccaggcaggcctgccatagtgaacaccaggcttaatgggtttttcctcagagatacttcacgtacagaggcagtgaactgactgctttctggttgaccaccttgaaaaagatgagtgtgcctggcactgtgcttctcaggtgagtatgacctgagaagtattagttgctggttcttctgcacacaatcattcaaggacatatggatcaaccatcctcctcaacagctcaaatcaaccagatcatctgaccacagagactgaggtgtacctgaaagctgcccacatttctataaggccaatagaagccatgaacacagttgtcaatctgtagaaataaggactccatgactcctccaaggcctctctgtgaatgaacgtttaagaagggctagatcctaaaacagggtcagagcttagagggaagaaaaagcataaacatttctgagcaaattgtaagggcagtgtcaccataggctcccagtgaccctctgtgattgagtgcatacagtgatgcaaaatctcatcatcagtgcaaaagacaaaaaaaatcttactctttctacctaggatgagagtccccaaatcagcgaagagtccacttactaaacagacataaggaaatgaagtgtcctggaagaattcctgcctgaacctctcaggagcatttgaggacatttatcaagtattcactccaggattgggactatgaagacttcagctgctttcagctaatcattgagacttttcaggggtctcagaatagtcaggaaaggacctgatgagtgaatgcaattactgatgttggagttgctgttattatttatcgtgtacatattacctccctctcttgaccattccagttcctgagtaactcaccagccctctgatctataaagtcacaatccctgtgacctgatttctgtttcactttgtagatatgggacccgtacacatggactttttaagagactgggaattccagggcccacacctctgcctttgttgggaaatgttttgtcctatcgtcaggtgagttgcttgagcttcctcttttgcttcttatggttgcaaacatcagcttagttccatcagtaaaaatgcccctccttgggagggagttctgaggtttcacattttcagaaatggtgggactgggtgcagtggatcatgcctgtaatctcagcctctgtgaggccaagactggcaaattgcttgagcccaggagtttgagaacagcctgggcaacacagtgagacacctgtctctagaaagaaaaaattacctgtgcatgatatggtagcccatgcctgtagtcccagctactctgaatgttaaggtgggaggattgtatgaacccaggaagtcaaggctgtattgagctgtgatcgcaccactgcactccagcttggtcaacagaacaagacagaaaggaagaaagaaagagagagagagaaagaaagagagaggaaggagaggggaggggaggggagrggagkggggaggagaggagaggagaggagagaaaaggagaggagagaggagaggagaggaaaaggtgtgtaggctccacccaaagcatggccaggtttacccctggagggaaagtcacaagctcatgtccagaaggccagtagcagcaagctgctctccagcccagatttcctatcctgtgtacctggagcttgtttctcagattctaactctcacaactgaagcctctgttgtctgattactatctgagaattctacacaattttaccctcgataaaagcagtaatttcttcttcatctttcccagatcaactcttgtagtagatcaacatttctgggaccttcttttgcatggttaaaacatcacagctgaatcttagcaacaggaaggtttgtttttatgtttcagaagtgaaagctcagagcacgcattgtaatttgctgggtgtgatgtgtagaggtggcatttctccatcttttctgtgttaagctagaaaactggaaaggaagtctactttctcattcactcactcactttctcactcaacaacatgccttagacttatctaaatctgcaagactaaaagaggttcctggtttctttaactttctaattctgctagagttctagagagagcacatgagataaatgaaaaggatactgatggaggagattaaaaaattgtgcattccctgcagacactcacttttcctcacctcagtttcacccctgcccttgcaggtgatcattcacggggttaggagactttagagagaataaaagaaaaagcaaaaatacatcagaaagacaaggaattacttactggtcatagacaagggtgagtccttcagtacttagagaaaattcaagagtgactttaaattccccacttcaaatatattctctgttttcttgtctttcccttaagacatctctgaatagcttccttcaactgccagtgaaagatagcaggcctgatttcattggacgcaactgttttcagccccaattagaggtagggtttattctatttaaaataataatcaacttgtattttgtttcctctcccagggtctctggaaatttgacacagagtgctataaaaagtatggaaaaatgtgggggtgagtattctgaaaacctccattggatagacctgctactgtgaggaggttaccccactgcaggatagtctctgcccaggtcttcatgggatgaagctcttgtcaacctaaatacaaacagagagaggttctctgaaagaagaggawaattacttgggagtagaatattgcaatgggaatctgcttgccgttataaactatgtgcaaattcagggaggtaaacaagacaaagatgctccatagaaaatatgagaagaatctcataactgttttgagataattattgttagctacaaagatcaataacaagggtgatgccacaccaaggttggacaggcagttgctggacaggtgtccttgcagaaatatttttgtgtaaagttgaaatagcctttgtgcaaagttgtggtttttgtagacacttttgtaatagttttgtttccaggaacacaagcataagaatcctctcttcatagccttcttgggatttatttgtcagggttaaaaaacaattagtgacatcactttggttctgataaagttcacactcgctattgtaaaacttttcgaggcttgtcctaccaaggatcccatgtgtcaccaggtatcgaggtcttcagtctgaactaggctaggagcattgtggttaccacttttctgcaggttttggtggcccagggactcccagcatcgccttctgtccagtgtctgcctattcccctcttctttttttcttccttaggtgcccttttatcacatgcattgtctcagacccttctaatatgtgctcataaatgcatggcatcatctccttcccacattgattcactttcaattaaaagccaaaactccttcatttagactgaatttaacatgtgcttttgaaagaagggttgagagataatagagaaacagattgggaaaccacttatgctccacttttttaaactttctctgcaagtatggaattttttgttctgctttgttgtttaaatttaagccaaaacttcttaatagaaggatatacaaatatttattggtttataccattgcacttactttgaagaagagatgctgaatattattaaaccattgtgttccctggtgggctgatggactgtgattttataaggtggtctcagccaattgcagcagctgttccctgtcagaggggctagaggtttggtgagagcagtggatgaggtgcagtggtgtgtttgttcactagaagcaagtgggagaaagctttgcctctttgtacttcttcatcttctcccctcaagtcctcagaatccacagcgctgactgtggagtgctgtggagctggcatggcccatacaggcaacatgacttagtagacagatgacacagctctagatgtccatgggccccacaccaactgcccttgcagcatttagtccttgtgagcacttgatgatttacctgccttcaatttttcactgacctaatattctttttgataatgaagtattttaaacatataaaacattatggagagtggcataggagatacccacgtatgtaccacccagcttaacgaatgctctactgtcatttctaaccataatctctttaaagagctcttttgtctttcartatctcttccctgtttggaccacattacccttcatcatatgaagccttgggtggctcctgtgtgagactcttgctgtgtgtcacaccctaatgaactagaacctaaggttgctgtgtgtcgtacaactaggggtatggattacataacataatgatcaaagtctggcttcctgggtgtggctccagctgcagaatcgggctagtgaagtttaatcagctccgttgtccccacacagaacgtatgaaggtcaactccctgtgctggccatcacagatcccgacgtgatcagaacagtgctagtgaaagaatgttattctgtcttcacaaatcgaagggtaagcatccattttttgaaatttaaataatgattgatccactgattaaatttttattttgaaaaaaacatatattcacagaaggttacctaaaaaatgtacaggaaggttccatgtactcttcatcctgtcccgcccagtggtaacatcttgcaatcttgtatattgcaatatatatctagtatattcatattatcaggttggcacaaaagttaaaatggcaaactacaggctgggcataatggctcatgcctgtaatcccagcactttgggaggccgaggcaggtggatcacgaggtcaggagttcgagatcagcctgaccaacatggtgaaaccccatctctactaaaaatacaaaaattagctgcgtgtggtggcatgcgcctgtagtcccagctactcagtagtctgagacaggagaatcgcttgaacctgggaggcggaggttgcagtgagccgagatcacgccattatactccagtctgggcaacccaatgagactccatctcaaacaacaacaacaacaacaacaacaaaaaccggcaaactgcaataacttttgcaccaacctaatactatagtacaggaaattgactttgatatagtttacagagcttttcagatttcaccagttttacatgcccttgtttgtgtgtgtttatgtgtgtgggtagttctaagcaatttttcacattcgtagatttgtgcaacgaccagcaccatcaagatgcagacccattccgtcaccatgtggctccctcctgctgtcctacagtcacaacatggagtttgtctttttctctgacaggttctatatcagagcaaacttttatttatttgaggaggccaatgtattaatatttccttttatggattgttcttttggtgttaagtctgaaaatcctttgcttagccctccttcctacattgctttttctaagagttatatagtttaacactttacaaaatgtaactctattacccattttgtgttaatatttgcataagttatgagatttagatcaaggttcattttctgtggactatggctgtccaaatgttccaacaccattttggaaaggtaggcatattgtcaaaactcagctgagtatattttgtgaatctatttcttattgtttactcctccactaataccacactgtggtgactctagtagctgtacagtaactcttaacatcatatagggcaattctttccactttattgatttatattttcagaatggctttagcttttcttgtcccttgcctttccataaaaattcagaataagcttgtaagtgtctacaaacaaacctgccataattttgataagaattaaagcagaggtgtccaatcttttggcttccctgggccacagtggaagaagaagtgtcgtgggccacacataaaatacacacacacacacacacacacacacacacacacacacacacacacaaatggtctgtgtatagttttcattatatatctaccaccacagataagcaaaaatgtccttgcataataatcctaattatgcactgccccattcagagggtctttcaaaatcattgaacaggttccaagtttgcaatcactgatacagaaaatgtacatatctagctaaacttcactacttttttgatattttttattataaaagaaaagagaacaacataaaactagtggggtacttgacattgtttttgagaaactaatccatcagtatctggcttgatggaagtagttgcaattctcagtgagttctcaaggtgctcatcagatattttggttctaattttactcttcgtgttcttcatccttgaaaatagtagctcacaaatgtaagtgctgccaaaaagcaatgacatgaacaaggtgtgattgtgaagcaagggatatttgtcattgggaagacaggtcttacaaaagtccagtaaagaggcaaaatcaaatttttctataagttgaacatcagattgcagctctaggcattccatttcaaaattgccaggtaacatatatatgtcgactgaaaatggagttgcaaatataccaaaatattgatgattttttcagaaatcttgaaatacctgttttcaaattcctgtatcaaattgaaaagcaaggctgcgtatttttggctgttcacaggaccatgtttagccaacatgtcgaaatgcataaaattgtttgccttaatttgagcttgccataatttcagtttcatatggaatgctgttatggtttgaaacattgtattgttaagttggttttcaacttgaagacacaggtttaactcacttaaatgggccgtcaaacccactaaaaatgctaaatctgtaagccagttttcattgtcaagttctggcaccaattttgtttgataccataaacagcttgatttcacatcacaaagcataaaatctttacattttgccttgacttaaccatcttacttctaaaaagtgaatgacttgctagagtcagcatccatacttttaaggaattcctgaaactagcgatgattcaattcctgggcccttgtgaaatttacagccttgatgacaatttgcatgacgttatctacttttaaagcttgtgcacatggattttcttgatgtattatgcaataatacttcatcaaatgtgasttttgtgtggcaactgcatcatctattaattgtacaagtccctctcttttacctaccatcgccagggcagcatctgtagctatatcacatatgtttacaaaggacaaagaaaattgctttaacatatttttcactgcttcatataaatctcttgatttagttgtgtcttttaatagcatggtgacatttcgatttcttcagtgacattatattcatcatcaatacctctaataaaaatagcaagttgtgccgtatctgtagtgtcagtgccttcatccatcaccaaagcataaaattttaaattagcagttttactctccaaacgtctttcaatagatttcccaatttctccaattctcctggctatagtctggtgagacaaactgattttagaaatatcagtttctcaaggcaaataatatctaccacatcttccagacattgcttaataaactcaccatcagtaaatggttttgatttttttgctattaaatttgctaccacataactaggttttaccttacgattgagtccgagttgtaactttttaaaaaatcttttttgttgaaaagacagactttttttcagttctgctattttgtccttacaacacatacacaccaaatttgtcagcacgtttttgcatataatgcctcttcaaattgtagtctttgaaaactggcacaaattccgtggaaattaagcagagtgcttcgctatttgcctyaacaagaaaaagtcatttgtccacttttcattgaacaatcttccttcatccataatttttgttttttagggttttctttttaagacattgtggaagccattctggaattaaaagcattataatagataagcaactatatttacttttattatggaaattaacagataggaaaatagaacagaaagcaaggtttaataatcaaataagaatacttacatgtcttctaaataatattaaacacctatcatctacaaaggtaggttgaaatattattgataattgctgggttttacttgccaaattgccacaaacacacctaatacctgacagtgtcaattcaactgtccgtgattagaagataacacactggaagtcgcacaccaccataaaactgaagccacacatgcgtacaaatggcgacagtgtctggtgtacagcagcgctctgccttgtccagaatacacacttgaattctttgtcacaattcacttcacgtggcactgcaatagcgtcctctcgctctttgttagttaattttaatggcttttaatttcttcttgctgaactgtttgcaattataatgcaaattatggatactagtccattatttgtggatgtgacatactctgattacccctttccattccattgttgtctacgaagttcacacttgagaatcacatagtcaaattacaaaattacaaaaaaaattgcaaaaaaactcaaaatgttttaagaaagtttccacatttgtattgggatacattcaaagccatcctggactgcatgaggcctgcaggccacaagttggacaagcttgaattaaaccaatagaacaatttgggtataatctatatctttactatgttcagcctttcatcccgtgaatatagtatgcctctccatttctttagcttttattactttcctcaacattttatagttttcagcatagaggtcctgtacatcttttgttagatttacaccagaaatatttcatttttgttggagtaactgtaaatgatactgtttttcttgtattttcagatattgattattgttacatagaaatgtgaataattttgtttgttgatcttgtatcctatagccttgcagaacttacctattcgttctagaaatttttttgtatattccttgacattttatacattgacaattatgtcacctgaaaatagagacaattctattatttcctttccaatctgtatgccttttatttctttttcttgtctagtgtattaagacatcaggtatgctctttagtaagaatgttgagagtgggcattttttagttcttcttgatcttggaaaaaccattcagtccttcatcattaaatgtgatttaactgaatgatttttttacagattgtctttatcaaatgaaggaactgtctctctcttcctagtttattgagattttatcatgacagctggaagtacacattttaaaacaaaacatagttgtggaagataagagaaagttccaagcatgctggcttgatagtccagccccaagttgggaaaagtaattatccctttctttttccttctatttatggaataaaaaattaagagaaaagaattttcaaggaaattgcattattccttcaaaacaggtttctagtctttaagtattacctacttttcaaaaaaaaatcaccacatcatggcatccctttttcaagttgcccatgctgtaggtgtattaaagacagagctggtctgaggcaacatacagtctgcccatctgtcaccaatccttttctactctgcacactcctggggaagggctaggtcttgttcctgtctattccactggaagaacagttccctaccacgtggagcatttgcaattaaaaggagactgagatatagaggcaggagaccacaccagatggctgggtctccccactcccacccccgccccacatacactcagaagaggctaggcatctaggatctccattgagcatcttgaatatggcttgccataatatcatatacagtcaataaatatttgttaaataaggatgcctcttcaatatattttgtgcaaccatgaagatcaccacaactaaygtgagaaaaaatgtttctgttgaactctagtctttaggcccagtgggatttatgaaaagtgccatctctttagctgaggatgaagaatggaagagaatacggtcattgctgtctccaaccttcaccagcggaaaactcaaggaggtatgaaaataagatgagtcttaattagaaatgtaaagaatgaatctggggacaggtagaaagtaagatcacagtccgtttccaaggggtagtccactgagttcgagcttcctaaaaatggtcttttatctttatgtacagaaaagacatcacaaaattcattacaaaatgtcacttactgctccatgctggagaaagccatatccttctgggacttgagtctgcacatttaactacaggtactgatctgttttgtgcttagatgttccccatcattgcccagtatggagatgtattggtgagaaacttgaggcgggaagcagagaaaggcaagcctgtcaccttgaaagagtaagtaggagcacagccatggggttctgagctgtcatgagcccttccagctgcctgccatggagtcgacagtcrcactgttgggttactccagtgaccagacaaaagcagggcagcgctgcaactccaaagagccacctaagagggagtggctcccatgaggcggcaagtcagcaagggaaaagggccttctctcctgtgcacaggagccaggatttacttatctgttaacttgtcaccataaatattctgggagattaaatacatactttagaaattaaaaaaacatgattgtatcaaagttttgagtgtagtggatatggaactgtgggtaagcaagcatttggtacttgttgccttgcattgggtaagatgggaaagttacaatggggaacttggaacaatttcaatcccttcatggtttttctgagaatatcagcaaactatgaactattaaaccttcccactacttccttttcctccaatctcaaaaaagaaagggtgctagaaatgctatgtgtagagcaagcctattatttgctgtctacaatggtatgtgcttcaattatgcaggaacgacaggtgtaatctgagcctgtcctgttcagacttgggacatgtggtcactcagttttgggttctccaaatcaatgttggagagatctattttttttaaccagaacattcttgattgtcacatcttacaaaaatgactctgctctcagcgcaacttcaggtcagaggagctggggatagtggggttttccagagcattagcagggagtgtagagaataaaggatgatatttctaggaactcagaacagggtgttactgttttgtaaagtgttgaagaggaattggctctgggcatagagtctgtagtcagacaacgccacctttcttgaatccactaggaagagttaattattctactcttgttctgctgaagcacagagcttacatatcttatatcatccacactcaacacatgctactgtagttgtctgataatgggtctctgtcttcctatgactgggctccttgacctcagaggtgagtctaactcagcttggtgtctccatcacccccagcatagggccagctccatcactggcaccagataaccaccttctgagggagtagatggaagatgattcagcagatagttctgaaagtctgtggctctttatgtgtcttgactggatatgtgggtttcttgctgcatgtatagtggaaggacggtaagaggtgctgattttaattttccatatctttctccactcagcatctttggggcctacagcatggatgtgattactggcacatcatttggagtgaacatcgactctctcaacaatccacaagacccctttgtggagagcactaagaagttcctaaaatttggtttcttagatccattatttctctcaataagtatgtgggctattatttctttctctctttttaaaaataactgctttcttgacatataattcacatatcgtataattcatccacttaaaaggtacaattccattgtttttaagataatcaaaaatatgtatgaccattactattgtaaactaaaatgtttttgtcaatctagagccctcacacactttagctgtcaacaccccaccacaaaccccaytgccctaagcatccaataatcaactttctgcctctatagatttgcctattctggacacttcatagaaataatatcattgatttttctctgttgttttttattctctatttcatgagtttattttagtctgttattttctttcttttgctggctttaggtttcatttgctcttcttcttttagtgttttgtggtgtaaataattataatcaatttgagatattttcttcttttaaatttagatattacagctataaatttccctctgagcactggtttggctacatcctgtgttttggtacatcatgccttctttttgttcatctcaaaacaatttcttgttgcccttttgatttctgctttgactcactggtcacttaaaactgtattgtttaacttccacaaatgtatgagtttcccaaatttctttcccttattgatttctagttttattccatggaagttgatgtacatatgctgtgttaattctatcttgactatcatttcctgaacagcatgattaagttaagcagcagattatggtctacattaatccaaaaactctagtccaatagataaaggctaagaggtcagggaatttaattctattactttggtcactccaaagactcagaaggtgccattgatctcactgctgtagtggtgtttcctatgtatagacctgcccttgctcagtcgccggcctgaaagaagggcaaacatgataaaaggaatgggttccagttgagaatcatgatgttcttattcttattactggtagagaaaattataattgctccaggtaaagtttgcattttcaatgatttccttttgttygttttgtttttcccacagtactctttccattccttaccccagtttttgaagcattaaatgtctctctgtttccaaaagataccataaattttttaagtaaatctgtaaacagaatgaagaaaagtcgcctcaacgacaaacaaaaggtaaaatctgatggtggttaaatgacgatgtttaggttttgataaatttagattttatacacatgatagagcatgtatctgtatttttaaaaataaagacagagaacttatgtttagaacaagagaagccatttggtagaaataaagaaggagattggggaaggagatgagaatgagtcagagagatagcatttaaaacttgaaatcaggcacaacaattagtatgtcatgatataaacagtattgagataaaattttaccacttctcttccctttaataaattgtcaaaggataaagtttcctgtttgaaaatatattttactggtattgtgctttcctcatatcacagattggtaaagaatcattttaagtccaagactcttattttacatattctgcaattaaaggtcctatgaggctacctgccgactgctgacatgtagtgtgtggtaaatgtgagtgtttcacagcctggagtgaacaggggtcttctctgagaattgaggttgcaaggctggctaactcagctttgccttcacgagccctagaggccagccgaaggatgtctgcaggtcagggagacaggaccaggtaacccagctgtcactgaagattatatagagtttgagaatgttggaatatttgaaaatgctcccccaaaaaagctgctgatgagttctggaaatgtcaggagattaatctatacggacactgctgaagaaaaaggtagaagaataaaagatccagtacttcttcctgggtaagcagttatgaccagagatggaaccggcaactctttggccagaaagctgtatccaaaagacagagaagatgagaaacagggagggcaaaggcraaaaagcaattggacatgatagctagatttgtttcaggaaaacatcctgctttccaaggatttagatgaatgtttttgttcactggtgactcagstaacacgtcttcaagaagccatagggaggttgagggagggaagtcaagaagggaggttgaggactgcacttttgatttacttctgacttcacgagtcactttctgccaaagaaatctctccttttgcttctagcaccgactagatttccttcagctgatgattgactcccagaattcgaaagaaactgagtcccacaaaggtaaccaaggagtgcttctgagggctactggyggggacactaagagggagggccttgttctgaaaatgtgcaggaagtattccaggaagatgagaatttttgccacatagcagaacaacacacatttagatgttataaatggtagctggaggcactttccagaagcccacaggtatagccatgttccaggctgaaagggcaaccctaagcaaacctagaatgcttggaggacagtcagtggtttgtggatcacctacatgagatcaaatgccagttctcagcctcctccagatccaccaagtgagaacctctacttggaaatttatatcaaacataccgatcaggargcacactatcccagtaagggtgattttaactggcagtacttgaaagtgtgttcgcaaggttaatctactgcaaagttttatttttccctttgaaatgcataagtaactaatgggggacacctctgataccatgtaaatctacttcaatcttcagtcttgtatctactagttttatgacccatggatggttttaaccaaaaccattattactaagacagtggcaaaatgataaccatggtcaatttcaagctaccaagatttggcaaccatctcacaaaatttttgaatatttaacaattggttctagagagcaggactcagcagactccagtataccactttaaacatgtccatgtctacatctacttctgtctgtctatctatctgtcaatcatctatctgcctataatttatcaattaatcatctatctatctcaacaaaacttgctgtgataaagaaaatagtctatcatttcactgtttcatatagaaatcactagacacatatggctattgagtactggacatgtggccaatgccactgaagaacaatttttaagagtatttatttttaattgaataaaatttgaatttaaatagccacatgtggatagtggctaccagattggacagcagagctcccaactttaaaattacagttcaatttcaactcagtataatggggttcaatgtaactgagtaaaataattggatggttgaatttacccacagcagcatacagaaatattcactgataaatcagaactctgtagacctttctcacactcattttatattgtgtttggttgtgagttacatgattgctgcaggcaccatatttatttctgtgctccaggtctctaaaggtcctaatccagtcctgaccaaacagactagtgatggaccatcgtgagcttctctcaggagaaatatcaagagggaggccaacctgtaatcataagaacttctgctattttaatgccattcatcagactacagtcaatcaccatgcttctggctttttgtctatctctgctgtcttgtacatcctgagatagtccattctgagaactgtaccctagatcttgtattgcctgatgcctgtcaaagatgtaatccatgctgcttaagtgaggttgtgcacacaaatcaccatatctcctgcaagtttggattttgattcagtagttcgatggtggggtttgagattctgcatttctaataagctcccagatgtggctggtgctgctggtccatgaaacacactttgagtagcaagaggtgatctgtagctcagtattggtcctttaagttccctcaaacatatatagagaaaaggtcctaaatattgcaaattctctcaaagtttgtcaagctatattggaattctctcaaagtctgtcaagctctattgtagaaaatcaaatttttattgggaaaaagcctaccccatatttacttacagataaagtacttttaggatcattcaaggcacacacccataacactgagtatgtaagacagaaatgctctctctggaaattacagcagtgctggtgctgggatgccatgatgaggagtgtgtggcccacaatcatgtagaccttgggaaaacctggattaaaatgattttgcgtcatcctggccctgtataagatacatatcagaatgaaaaccactcccagtgtgactttgaattgcttttccattttttcttcttgggattagagagcttcacttagatttcatctaagctgtgatgttgtacgttgacctgatttacctaaaatgtctttcctctcctttcagctctgtctgatctggagctcgcagcccagtcaataatcttcatttttgctggctatgaaaccaccagcagtgttctttccttcactttatatgaactggccactcaccctgatgtccagcagaaactgcaaaaggagattgatgcagttttgcccaataaggtgaggggatgasccctggagatgaagggaagaggtgaagccttagcaaaaatgcctcctcaccactccccaggagaatttttataaaaagcataatcactgattccttcactgacataatgtaggaagcctctgaggagaaaaacaaagggagaaacatagagaacggttgctactggcagaagcataagatctttgtacaatattgctggccctggttcacctgtttactgttatcacaataatgctaagtaaaaaaaaaaaaaaaaaaaaaaaaaaaaaaaggagtgtggcgagaagatggccaaacaggaacagctccagtctacagctcccagcgtgagcaacacagaagacgaatgatttctgcatttccaactgaggtaccgggtgcatctcaatggggattgttggagagtgggtgcaggacagtgggtgcagtgcacccagcctgagccaaagcagggcgaggcatcacctcacctgggaagtgcaaggggtcagggaattccctttcctaggggtgacggacagcacctggaaaatcaggtcactcccaccctaatactgcgcttttctgatggtcttagcaaacggcacaccaggagattatatcccgcgcatggctcggagggtcctacgcccatggagcctcgctcattgctagcacagcagtctgagatcgaactgcaaggcagcagcaaggctgggggaggggcgcccgccattgctaaggcttgagtaggtaaacaaagctgccaggaagctcaaactgggtgaagcccaccgcagctcaaggaggtctgcctgcctctgtagactccacctctaggggcagagcatagccaaccaaaaggcagcagaaacctctgcagacttaaatgtccctgtctgacagctttgaagagagtagtggttctcccagcacacagctggagatctgagaacagacagactgcctcctcaagtgggtccctgacccccgagcagcctaactgggaggcaccccccagtaggggcagactgacacctcacacggccgggtactcctctgagacaaaacttccagaggaatgatcaggcagcagcatttgcgggtcaccaataccgctgttctgcagcctccactcctgatacccaggcaaacagggtctggagtggacctccggcaaactccaacagacctgcagctgaggatcctgactgtcagaaggaaaactaacaaacagaaaggacatccacaccaaaacccatctgtacatcaccatcatcaaagatcaaaggtagataaaaacacaaagatgggggaaaaacagcagaaaaactgaaaaatctaaaaatcagagcacctctcctcctccaaaggaacgcagctccgcaccagcaacggaaagctggatggagaatgactttgacgagttgagagaagaaggcttcagacgatcaaactactccgagctaaaggaggaagttcgaacccatggcaaagaagttaaaaaccttgaaaaaagattagacaaatggctaactagaataatcaatgcagagaagtccttaaaggacctgatggagctgaagaccatggcacgagaactacgtgatgaatgcacaagcctcagtagccaattcaatcaactggaagaaagggtatcagtgatggaagatcaaatgaatgaaatgaagaaagaagagaagtttagaagaaaaagaataaaaagaaaggaacaaagcctccaagaaatatgggactatgtgaaaagaccaaatctacgtctgattggtgtacctgaaagtgacggggagaatagaacgaagttggaaaacactctgcaggatattatccaggagaacttccccaatctagcaaggcaggccaacattcaaattcaggaaatacagagaacgccacaaagatactcctcgagaagagcaactccaagacacataattgtcagattcaccaaagttgaaatgaaggaaaaaatgttaagggcagccagagagaaaggtcgggttacccacaaacacaaacccatcagactaacagtggatctctcggcagaaactctacaagccagtagagagtgggggccaatattcaacattcttaaagaaaagaattttcaacccagaatttcatttccagccaaactaagcttcataagtgaaggagaaataaaatactttacagacaagcaaatgctgagagattttgtcaccaccaggcctgccctaaaagagctcttgaaggaagcactaaacatggaaaggaacaactggtaccagccactgcaaaaacatgccaaattgtaaagaccatcgaggctaaggagaaactgcatcaactaacgagcaaaataatcagctaacatcataatgacaggatcaaattcacatataaaaatattaaccttaaatgtaaacgggctaaatgctccaattaaaagacacagactggcaaactggatagagtcaagacccatcggtgtgctgtattcaggaaacccatctcacgtgcaaagtaacacataggctcaaaataaagggatggaggaagatctaccaagcaaatggacaacaaaaaaaggcaggggttgcaatcctactctctgataaaacaggctttaaaccaacaaagatcaaaagagacaaagaaggccattacataatggtaaagggatcaattcaacaagaagagctaactatcctaaatatatatgcacccaatacaggagcacccagattcatgaagcaagtctttagagacttacaaagagagttagactcccacacaataataatggaagactttaacaccacactgtcaacactagacagatcaacaggacagaaagttaagaaggatatccaggaattgaactcagctctgcacaaagtggacataatagacatctacagaactctccaccccaaatcaacagaatatacattcttttcagcaccacaccacacctattccaaaattaaccacatagttggaagtaaagcactcctcagcaaatgtaaaagaacagacattataacaaactgtctctcagaccacagtgcaatcaaactagaactcaggattcagaaactcactcaaaaccgctcaactacatggaaactgaacaacctgctcctgaatgactactgggtacataacgaaatgaaggcagaaataaagatgttctttgaaaccaacaagaacaaagacacaacataccagaatctctgggccacattcaaagcaatgtgtagagggaaatttatagcactaaatgcctacaagagaaagcaggaaagatctaacattgacaccctaacatcacaatgaaaagaactagagaagcaggagcaaacacattcaaaagatagcagaaggcaagaaataactaagatcagagcagaactgaaggaaacagagacacaaaaaaacccttcaaaaaaatcaatgaatccaggagctggttttttgaaaagatcaacaaaattgatagaatgctagcaagactaataaagaagaaaagagagaagaatcaaatagatgcaataaaaatgataaaggggatatcaccacccatcccacagaaatacaaactaccatcagagaatactataaacacctctatgcaaataaactagaaaatctagaagaaatggataaattcctcgacacatacactctcccaagactaaaccaggaagaagttgaaactctgaatagaccaataacaggttctgaaattgaggcaataattaatagcttaccaaccaaaaaaagtccaggaccagatggattcaccgccgaattctaccagaggtacaaggaggacctggtaccattctttctgaaactattccaatcaatagaaaaagagggaatcctccctaactcattttatgaggccagcatcatcctgataccaaagcctggcagagacacaaccaaaaaagagaattttagaccaatatccctgatgaacagtgatacaaaaatcctcaataaaatactggcaaaccgaatccagcagcacatcaaaaagcttatccaccatgatcaagtgggcttcatccctgggatgcaaggctggttcaacatacgcaaatcaataaacataatccagcatataaacagaaccaacgacaaaacccacatgattatctcaatagatgcagaaaaggcctttaacaaaattcaacagcccttcatgctaaaaactctgaataaattaggtattgatggaacctatctcaaaataataagagcaaatttatgacaaacccacagccaatatcatactgaatggacaaaaactggaatcattccctttgaaaactggcacaagacagggatgccctctctcaccactcctattcaacatagtgttggaagttctggccagggcaatcaggcaagagaaagaaataaagggtattcaattaggaaaagaggaagtcaaattgtccctgtttgcagatgacatgattgtatatctagaaaaccccatcgtctcagcccaaaatctccttaagctgataaacaacttcagcaaagtatcaggatacaaaatcaatgtgcaaaaatcacaaatattcttatacaccaataacagacaaacagagagccaaatcatgagtgaactcccattcacaattgcttcaaagacaataaaatacctaggaattcaacttacaagggatgtgaaggacctcttcaaggagaattacaaaccactgctcaatgaaataaaagaagatacaaacaaatggaacaacattccatgctcatgggtaggaagaatcaatatcatgaaaatggccatactgcccaaggtaatttatagattcagtgccatcgccatcaagctaccaatgactttcttcacagaactggaaaaaactactttaaagttcatatggaaccaaaaaagagcccgcattgccaagtcaatcctaagccaaaagaacaaagccggaggcatcatgctacctgacttcaaactatactacaaggctacagtaaccaaaacagcatggtactggtaccaaaacagagatattgatcaatggagcagaacagagccctgagaaagaatgccacatatctacaaccatctgatctttgacaaacctgacaaaaacaagcagtggggaaaggattccctatttaataaatggtgctgggaaaactggctagccatatatagaaagctgaaactggatcccttccttacaccttatacaaaaattaattcaagatggattaaagacttacatgttagacctaaaaccataaaaaccctagaagaaaacctaggcaatatcattcaatacagaggcatgggcaaggacttcatgtctaaaacaccaaaagcaatggcaacaaaagccaaaattgacaaatgggatctaatgaaactaaagagcttctgcacagcaaaagaaactaccatcagagtgaacaggcaaccgacagaatgggagaaaatttttgcaacctactcatctgacaaagggctaatatccagaatctacaatgatctcaaacaaatttacaagaaaaaaacacaaccccatcaacaagtgggggaaggatatgaacagacacttctcaaaagacatttatgcagccaatagacacatgaaaaaatgttcatcatcactggccatcaaagaaatgcaaatcaaaaccacaatgagataccatctcacgccagttagaatggcgatcattaaaaagtcaggaaacaacaggtgctggagaggatgtggagaaaacaggaacacttttacactgttggtgggactgtaaactagttcaaccattgtggaagtcagtgtggtgattcctcagggatctagaactagaaataccatttgacccagccatcccattactgggtatatacccaaaggattataaatcatcctgctataaacacacatgcacacttatgtttattgcagcactattcacaatagcaaagacttggaaccaacccaaatgtccaataatgatagactggattaagaaaatgtggcacatatacaccatggaatgctatgcagccataaaaaatgatgagttcatgtcctttgtagagacatggatgaagctggaaaccatcattctcagcaaactatggcaaggacaaaaaaccaaacactgtatgttctcactcgtaggtgggaattgaacaatgagaacacatggacacaggaaggggaatatcacacactggggcctgttttggggtgggaggagtggggagggatagcattaggagatataccgaatgttaaatgacgagttaatgggtgcagcacaccaacatggcataggtatacatatgtaacaaacctgcacgttgtgtacatgtaccctaaaacttaaagtataaaaaaaaaaattcaaaaacctcagtggcatctaatgagaagcatttattgctcacaagactggatagtgagttctgctgatactgactggactcactctggtctggctatggtctgaggtagcctggccctgggggcgcgatggaggctgactcagctctccccacacctgtctcatgttccagtcaggtagccactggccaagaagccaagctaggaaccagggtatctgactcctgagctaaactctaaccctctacaatactgcctcccaaatataacaccaagtgctaggtacatatcatccacagttttcagacttctgcccaaactgggattctttttagtgtgaagagacctggcctgtggggctgaccctggtgtggctgtgaggcagacacaaagggacatttacatccagtcctgaagattacagtccagccctgaagcaacaactaggaaactattccaaaaggaggggatggggctgagtgtggggttctattctcttcataactttaactagaactcaaattgtgtaccttggtagcatccaatcataaatttattttgtcgtatttgtgatagaaaggaacaagtttatccacaaatttatttatttatttatttatttatttatttatttatttwgagacagggtctgactctacgacccaagctggagggcagtggtgcaatctcagctcactgcaaactctgcctcccaggctcaagccatcctcccgcctctgtctcctgagtagctggaactacaggcacacgccaccacacccagctagtttttgtattttttgtagagatgggttttcaccatgtttcccaagctggtctcaaactcctcaaaagagttaccaagcaggactctgcaaccaataatccttgtgtgaagaggatatttgctcttttccctgtttttctttcttggtacagatgtgtgacctctttttgaaaggtgatagtgactttggtgtattttatttggtggtaatggtcatagccccattaatcacatttcttcccatgagaaagaaaaaccactacatggtcatgctaaggatttcagtccctggggtgaggatggtcttgaatatctcctacattcataactcctccacacatctcagtaggtcactgagcacatcaatggacatgccagttattaaaatacttcacgaatactatgatcatttaccagtatgagttattctctggagcttctaatacttcartagtactgcatggactcagttgagagttaattcaaaatctcagattatccaattctgtttctttccttccaggcaccacctacctatgatgccgtggtacagatggagtaccttgacatggtggtgaatgaaacactcagattattcccagttgctattagacttgagaggacttgcaagaaagatgttgaaatcaatggggtattcattcccaaagggtcaatggtggtgattccaacttatgctcttcaccatgacccaaagtactggacagagcctgaggagttccgccctgaaaggtacaagtctccagggaaatggagctcaccctgacccaggctggttcaagcatattctgcctctcttaatctacatgacaatcgtgtggttgtacaatcatttgcttgtaagtctttttatcacaaaaaagtgataattatcaaactttacaaaccacagactagaaaaaacgaaactacatccatccacagtcccagcacaagacaaagataatcaattatgtccctgtgggcatttttctacgcctatatagatttttaaaaattagaatggtatcactttttatttggtttgaattgctgcttacttgatttaacaggaaactatccactgacctatattactataaatatacatatatatgtatatatataaatatatatatatgtatatattgcatatgccataaaccatttaaccatgatgttatttcaggtgtataggctttttattcctttctgttttttctatgctgtgccctttagctctctgaatttaacagaaactttaaaacatgcttccacattccatttgctttcaacgttacttgctatttcctctgtagtaattataagagtgcaggctgaggtcctgagaagtcctcatccctaatggtttaagccacttcactgaagacacaagacagcacaggtcctcctggtcctatctgtggctgcagtcctgtgccagctcccttatactctcagtagacatctcacacactcctccttggaggtgtcttgagcatgctcttctgggaattcagggacaaggtcaggccttaggcacagttcgcactctggatatagttggtgttttcccattactgtattattaagcaaaatttagaatgaaatttttagggtactggctggtgattcaggatgcttgggatctagactttcattagcccctacctgcaagtttgctgatgggaggaaccttgtcttgttggtcatggtgtccctagtgctagcatggagtctgcacataatacttgttcacagagtaagtcagagctgaccaagttctctgttttctggagtagaggacttctatgtttcctgcaagctcagcacttccacctcctgtggctgcactaatacgaaatcagagaccactcgctgtacttcactttgaatcactcagtcaccaaaaagatagtgcttgccatgtgtcaggaacttggctaggcagggagaaattcatatgatttatataaatccataaatccatatgatttacataaatccataaattcatgtgatatatacgtatatgtgtgtgtatatatatattagagaatgtttgacatatacacaagtacatgttaccgacaccagcctatagaatagttttcgtgcatctccatatatctatcactggttccaacagccatcaatccatgttagctgccccatccaaatgccaccatcaccctcctcctgactatcatgttattttgaagcaatagcctgtaaatatttcagaatgctctccaaaatataaagactcctgtaaaaacatatgacaacaatgccattattactttctttgaatcaacattttttccttaatataatcaaatatttagaaatcaaatttgaataaaacatgggtcaatcttcaaagaatttatagcttaatggaacagatcaaggaaagcagggatgacactacagtagggtagcatcatatgcccatgtaacttatgtgacttaaactatcctgtaagggtgtgggggagaaagagaggaagagatggagagaagaaaaaggaagagaaggaggaggagaaggaggcagaggagaaggtggacggggaaggtagagaggaggaggaggggaattagaaaaaaagagatgacaggagaaggaaagggaaaaataacaacttgaaatagcacaagacgttttctccttctcctttctcaatgagcatgtgaccaacacaagtgtgagttgaggcaggaatccacttttccatccatcagtcttatcatttatgtgccttttatagtgtgaacacatcaccaccctgaatataattttagtgtttagagataaatattatttgcaacaatattcatctcatctcaagaaacgctcctatagggtatggagaatttaaaggacctgtaggttatgatgattataacgaaataaccaaagcaggatttcaatgaccagcccacaaaagtatcctgtgtactactggttgggaggtggagggggggttgttcttaagtaagaacccctaacatgtaactctgtggtttttatgtttcattaactatttaatctaccaatatggaactaggttcagtaagaagaaggacagcatagatccttacatatacacaccctttggaactggacccagaaactgcattggcatgaggtttgctctcatgaacatgaaacttgctctaatcagagtccttcagaacttctccttcaaaccttgtaaagaaacacaggtcagtacactttctgtatgttttattaagaatttttttaactgaagggtatatattttttaaaagaatatgcatgtttatcttttaataattcattctatgggccaaagaacctacttggatccatctttgatcattaaggatgcttcagttctggacttcaaaacctgtagcattaagaacatcatgtaaagtccacacagattagcatgacatgattatgtgtagtctctttgaacctgagtaagtttaaattcagtttcaagtcaattggaaagaagtgttttgcacaatcatgaagtgcaatgattacctggctgtgacttaaatggtgttctccatcaccagaacctgcagaagctctctcatgacagtggttctcaaccactagctgtatattggaatcaccagggagcttcaaaaattcatgatgcctgtgacatctcagaaattctaaactaattaacccagagcgtgactaggttctgtcatgctgtcgggtgaacccctgattagttctcacgtgaagccaaggtggagaatgactaatttcaggcatttctggtggatatgaaggactaccatagagcagggctatccttactccttgaccttatgttccaggtgatacatttaaagaaagatttagaatcttttctctgaagaagttaaagaacagatgtcattgattcatattaagcaatagcctataagtcttatttccaggaccggtgtatttaatatgcaactctaccccttaagtacactttgtgcttgggagaggaggaggatggagatggttgccatcttatctatggcttcagggcagctgtgtagctttcctatgtgtgtattcaggcagggggctcagccctgagagaaagtgggcctctggcacacctgggacagggaagatattccctggcaagctctcaggcatctcaggctggcacttctttgtatccatggcaatttgctttcccctcactgaactgagatcagaatgttactctgttggtggctcccccaacagtgaaggggtgactcagtgacaatagtgctagaagtatgagtcaaaacactgtacaacttgagaaattccccgtttgcactacgcttggaagccaagaggagatgttaaaaagaaaagaataattctttctgaagacatttcccatcattgcacttgatgggttcaactgggaagggttactagactctggaagttgaaaactgcccacataattaaactgtacaacagctactcaggattaccttgcaagttttaacctataaaaatttaactttatatagcacttccaaaatagtttgccataatacctactaatctggatttaatttttaaaactcatccttttaacttaagatttaaataaaaaaaaaaaaacacgagtccacaagaatttgtctcaggcctggcacagagtcagtgctccataaatattttgttaaacgatggatggtgagtgcttttactatccagtatttacccagcttatagattaagtatgaagagttcaagatacatggtgttaagagtcgtttttatatgcttgcaaagcatttttgtcatattttttctactttgcttccatcttttcttctttcacttcatttattaattctccatatgcttgtttaactattgtagatccccttgaaattagacacgcaaggacttcttcaaccagaaaaacccattgttctaaaggtggattcaasagatggaaccctaagtggagaatgagttattctaaggayttctactttggtcttcaagaaagctgtgccccagaacaccagagatttcaacttagtcaataaaaccttgaaataaagatgggcttaatctaatgtactgcatgagtagttggtgattttgtacattcattgagctctcccagagtctgtgtagagtgttgtgcattatgtagtataaaggaggtgaccaggtaagtgacagataggtagactcagcttctctgcttctcataggactacctctacccacctctagttagcattatcaactcctcctgagctctcatcagagaataaatatttctcaacaatttgatccataacttttaagaaaaataagaattatcatgatgactctaatagtgacatttatatcacgttttatttgtaatattctataagttttatattaagcgaagtgataaaatcccctttacaaaaatattatctgatgccatcctgcacactaaagagaaatctatagaactgaatgactgaaaaccagcaaataaacattttttatcattgtaatcactgttggtgtggggcctttgtcagaattccaatttgattattaacataggtgagagttaatctgctgtgactttgcccattgtttggagaaaatattcatagtttcattctgccttctttgaagaacatattttttgtaacactcaacgaagcacttatcatattattagttatgatttattatttttaccacatctcccctgacatttctggaacacaggaaacatgttttcttatacgtcttgcattccatcttcacctcccaattgtcttaatgcaatgaacactgaataaaaaattgtcaattcgtcagttgattgggcagcatgtctaaaagcactattcattttccttttttattctttcattttccctccttttctgaatactaaagccattaggtgggttgcagccatgtggtagccacacattaaggtggacaagagagtcatggtggctccaagtcagattccaagtgtgctggggaaggcatccacatggaggggcagcctgacctggaagcgggagcccaagcaatcagagaaggggtccacacagaggtgtggccttcaagagcagccagagcctaaatagggcctggagaacccacgtgaggtgaggagggtatccctgagtgggaagggatgggtgagagttggctacatagaagggattgatcacataagtaaataaagtatactggaagctaggtgtgtcacttttgcagaaaagagtcatagattcagaaagggagaaagctagcattaatcctatggtgttagattggaatggatgtatcagtgtacattcatacttttctagatagatagatggatagatagacagatgatagatagataatagatagttgatagataattagatgtaaatatatgtgtttgtatgtgtgagcatgcatgtgtgtgtgtgtgtgtgtgtgtgtgtgtgtgtgtgtgtgtataaaacatatattccctacttcactgatagggctagataacaatgacatttcaatagcaatgagtatacttagtgcctagatcttggcttatgaatatcattttccactgaagggaaccagagctcgttagagaaatagctgatgccagggctaggactaaaaatgttcaagatgagcccaggacactttttgtgccaggaagtaagaaaacactcaaatggtttctaaatggtatttggaaatgatttctaaatgatatttccatatgacttccaaatgatattttaaaaacctaaagactccaccaaagaactattagaactgataaacaaattcagtaaatttgcaggatacaaaatcaacgtacaaaattggtagcacttctatatgccagcaaggaacaatctgaaataaaatcaatagccacaaataaaattaaatacctaggaattaacttaatcaaagaagtgaaagatctctacaatgaaaactataaaacaccgatgaaagaaattgaagaggacacaaaaacatagaaagatattccatgtttatatatttcaagaatcaatattgttaaaaatgcccacaatacccaaagcaatatatggattcaatgcaatccctatcaaaataccaatgacattcttcacagaaatatttttttaatcctaaaatttgtatggattcacaaaagaccaagaagagccaaagctaacatcagcaaaaagaacaaaactggaggaaacacatttacctgacttcaaagtatactacagagctatagtaaccaaaacagcctggtactggtataaaaacagacacatagaccaatggaacagaatagagaccccagtaacaaatctacacatctacagtgaactcatttttgacaaaggtgccaagaacacagactggggaaaagaaatgcaaactatacatccaacaaaggtctaatagccaacatctataaagaacttaaatgtacaagaaaaaaaaattaaaaaatgggcaatggacatgaacagacatttttcaaaagaagacatacatgtggacgacaatcatataaaaaaaaagcttaacatcactgattactagagaagtgcaaatcaaaaccacaataagataccatctaacaccagtcagaatggctattaataaagagtcaaaaaataacaggtgtggcaaggttgtggagaaaaataaacacttatacactgtcggtgggagtgtgaattagttcaaccattatggaaaatagtgtggcaattcctcaaagatctaaagacagaaataccatttggcccagcaatcccattactgggtatatatccagaggaatataaatcataaagacacatgcacacatatgttcactgcagtactactcacaatagcaaagatatgaaattaacctaaacacccatcaattacggactgaataaagaaaatgtggtacatatacaccatgggatactatgcagccataaaaaggaacgagatcagctgagcatagtggctcacgcctgtaatcccagcactttcagaagccgaggtgggcagataacgaggtcaggagatcgagactatcctggccaacatggtgaaaccccatctctactaaaaatacaaaaattagctgcatgtggtggcactcacctgtaatctcagctactcgggaggctgaggcacgagaatcgcttgaacccaggaggcggaggttgcagtgagccaagatcgcgccattgcactccagcctggcaacagagtgagaccatccccacattctgaagtgaacctagctctggggccaggcttgatcgtcctcctcaaagccatcctgctcctgctgggtgggcttctgtggctccaggcacttgcatcaggagtgtctgcagtgaaggtctcacgtctgaccctcctgacctcctgagctgacctcaacctgtcccactatgtgttctcttttttcaaaaaaagaaaggtctgttacatacatggaaaggaaagaaaggagaccagatctggcattgcttttctgtgagtgaagaacatgcaggaaatcggctatcataatccctaggaatgtgcttctccactcattgacttgggaaaggaaacaaatgaagaaaggcctcataaaaatgagttcatgtgggaggaattatatgcagcttcctatcaattacagtaataggctgcaaagggcgtggcggaggaaaaagaattactcagagggtcacaacaactgccttctagtccaagtccctctcatttaccaaagacaccatgcttttagtccccctcatgctgttcaggcagcccaacttgcccatttctatctacaaaattccacttgtccttcaaggctcagatcaaatatcatgttcttcatgaagcctccagtgccctaggccaggagagggtcttctttcccctccagagttctccagaatgcaaattctgtgacagtccttttcatgctctgcttggcatcagtcaagtgcaccccaaatgctaccccaaacaggactgtttgttcttaagttgtataaaagatcctgtttatccaaataaccccatccacagaagaatctatcacagcacctggtgtaaaacaatgactcagtacaagtgtgctgctatagctaatgatggtgacggtgacaatgatgacaaggacgatgacagcaaacactggagaaagaacactgatgaccatctccaagagattttgccttaacccattccctttgtctccttgatcctgatcccatccaaagaaaaagaattaagtgtgtgcttgtcagagccccaggatctcactggcccctattttatgaagggtggtgtgcctcacagggtcagcatctgagatgaagcttccttcctttttgcctggccctgaacagtcttctgcttgtgcatctcttggaattcccatttggtctccaatctccctcctgcacagtgtgcctgaacccacaggtcttcaactcagatgtggggctgagaggggggagcaatgcaagcctacacgatctcacaactcccttccccagtgacctctatgatgcaggttactgggtgcagctcagatactactacagtgggactgagagccccatctgctgttgctccttgggccatcggggttgggatgattggcagggcaagaatcagcctttcctgggtctctggccataaaaccacaaaaaactcaacagaatctcacctcaagactgtgaaaatgacatgaagagttgacatcactatgaagaaatgttcaatatgcatttgctgtaatggtgaagaatataatgatttggccccatggaaaaaaaaatgaacatgaaaaaaaaagggggggcagcaatgggtaaacatgaaagaccttcacctaaccttgctctatgctggtttgtaaggagactttccggctcacaggcttctaaagtccaatggagtacatagggtaagatgattcttctcttatggcaaacgcctttctagatgggcaccggtcttggcctgcaggctgcttgcttaggggtatggggagagaaacattccctttctcatcctgcacataatgcaaccataaaaggttcagaagcttagtcactcttacagacttggaagtgtaaactcgatcctataaacaccagaatttttatttctacttcaaaaataaattgcttttttgaaaaaaagaaaaaataacttcattacctacattaaaaaatcattattaaggaccactaatggggaagtaaaagtatcctcaagaataatgagaataataataatatctcctatgtggtcctttccaagttccacaatactttcacgcccatactgtctctgttcaacttggatgccttcttcacatcacagaccacaggtacatccatttaacaaaacaatctgagcttgagtgactagtatgtaccaagcaccattctaggtagtgggggaaatatcagcaaaaaaagcaaagtttctactttcacacagctgaagttccagggcatgtggtagaacaggaaacaaaaacaaatttataatacgtcagataatggtaagggctacaaagaaaaataaatctacgtaagaaaatagagactgatggggagtgctactgtagaagggttgtgttccaattatctattgctatgtaattaaaccactcatacttagtggctaaaaacaatagcatgcatttattttcgttcatatttctgggggtgactaggctgagcttggcagtttccctgtagggtctctcacatggttccagtcaaacagggactggagctggagtcatctggagggttccttctcacctgactgatggttggtgctaggtgtccactatgaccacagtgaggactattgctggaatacctctgtgcagcctgtcaatgtggtggaggttcctcccagcattgcagctctgttccaagggcaagcatcccacctatcacctcttatgactaagcatcactgccttcacatttaatttgttagaagtgagtcactttggtcagtttcaagaggagaggaactggactctaactcttggtgaaaagagtgtcaa

SEQ ID NO: 94285 - DNA, 50542 bp, Homo sapiens
ggaagtagatatctcagggaagggtgagggaaggattaatctcatcttatccttaccctgtacctggaaggataagctcataactgacaatattggtgtggaatcttttgaaggggctgctttctttttcacctttaggaaagaaggtctaatgacagtgagcaatggagggggtataatgaggcatgctggacctcccttttcctcatgccctggaattcagtttttcaggttcctctggggtccacttagccaacggtgggtctgtttatttggtggagggggcttgggattttgtttttggtttacattctcctttatttgggccaagattttccagagccaacatcaatggcagacttttatttggtctcatcattgctgtaatggtgtggctgtctgccccaagtccaccctgtccctccatggggctcttatggccaaaggacttaaagccaaaagactaatcgctgatttatatgttctaggccagacaggaatagaggtgggaaggcattcatcaatccttaaaatcttttttaagtaatataagagccaaaaaacaaaagtcaaaagacttttgtcatgaaaggcaaggttacaaaatagacttatctgtaagttatatgcactgagctactataatctaggttttagttacagacttgtagcaattagctgtataaaacttgagcattttgttaaaaccatttaagctaagaaatttagagactctggttgtcctgcaaagtttcttgtggtctctctaatatttgtcctaaagtggtcagtacatttatttttatagatctatttgcataaattctataactgggaacaagtgtacaaaggttattgatggcagtggctgctccagacagcctgccactgccattacgctggctgcagcagggaggtgggcggggctgcacactccatggagccctgcccaagttggggcaggagctccctgggtgctgctgcagccacccaaaccacagctgcagacccaggcctccagctccatggagcaggcagaaatcctccctcacccacccctacaacccaccccacctttcctcacccccatcccccctaccctgcacagctgcagccacccaccagctgcagactcaggcatccctgcactcttgggggcccaggaaggcccccctaccctcacaggctccaaagtgcctgctcctgctccctggcttctccctgctgtcagcaccctctccaatctcatagcaaagtgaggctgagccctggtgccaagaatggaagcaggaggcagacagattcccaggtagaagtaggtgggtccccagtgaggccccaccttcaggtcagggagggcctgaaggctggtggctgggctgccaatcccattgaccagactgggaagttgtgattctttttccagcccttccatggctgcccaaggaccgatcagtgcacacttcctcccctctagggcccataaaagccccaggctctgctagagctgagcagacatcaggtggaccagctgcagaaatgagctaccctctctgctgatagcaagagacatttagacaaccagcagcagagaggggctacccactctagggcctcctctctgctgagagcctcagagacccgcagagacatgcagactaccagctgcagagaggagcaacccactccaaaaccccctctctgctgagagctgcagagatgacaggatgacctacctgaagagaggagcctcccaacccagggtgtcttctctgccaggagctgaacactgatcgggacaccctgactgtggaaagtagctaccctttgtgggtctcctgtgagctgttctattgctcaataatgctcctcttcatcttgctttccctccacctgtctgcatacctcattcttcctggtcgaaggacaagaactcaggacccactgaatggcagaggtaaaacagctataacataaacagggctgaaacatgccccttgctcaccacgttgcaggcaaagagaaggagagaagagccacagtccttcagggagcccagacctggaagctccccaaaacagggttgtgactctttggtatcctgcagtgcctggtgtctccaagtttgcagtaaccactgcattccccagtgctggctggggaaactgcttgcagtgcacctggtccagccacagcctcacagagagccagtgcctgtgccggcacctggagctgcctgtcactgcagcggctgtagtgtctgactgtgcagtggcctgaccccacattcattcacacacccctcatggctccattcctaactcacccttggcaggcatgggatccaggctggtagtgtggactgtgtgcagcttgccaacccaagtgggtggaagaagcccagcaagtccgagcaaaacttgggcaaaggtgccactggccagaggttttaggccataaaagcaacacctcaaggatcctataacattattgtgatgtcttctccataattttcttatctttttatggaaatttcttgattagattactgaattcaggatggagctcttaaatagagtgatgaaagctttttttccctcttttttgaaacagtctatctctgtctcccaggctggagtgcagtggtgtgatgtcagctcactgcaacctctgcctctcgggctcaggtgatcctctggatcacctcagccaccccagtagctggtattacaggcatgcgctaccatgcccagctaatgtttgtatttttaatagacatggggtttcatcatgttggccaggctgatattgaactcccggcctcaagtgagtcacctgcctcagcctcccaaagtgctgggattacaggcgtgagcctccttacctagccaaagaaagcattttaatgtttggctgtactatgaataattctgaaaaagaagtcagtctattttacctgaggatctatcctttataaacattttaggctttgattttttaaaactgaaggtacccttttgagtgacaccaaaaccagtaagttcaggcctgttgatatgtgacactgggtaggttctccggggattggactttcccaggactaaccaagtcacaagggttagggaagcaaaagacccatagggatggggcttcttaagagaaactcccccgagagctggacatgtgtagaacaacaggtgtgttcttcagaagcaccagctgctcagtccgcagagccagctccaacaagtgggcttataggggtttcaggcccatgttctacactcctgtagccccttttatgacagaacagcacagaaatacaggaacaaaggaaaagactatttctagaggaaaaggggatcaaacgatgtgagtattcataagagaaagtactagagagtaccctagagttgctgcacccagcactagtaacacaaatccttttctcctatttattaagattttgcagaggagacaaagagcaattcttaacatctgcccaagtggatctcccagaaagaaaggccaggagcttgtctggaaagaaattcttacttttctcagccagacatggaggcatgtgcctgtagtcccagctacttgggagactgagatagaaggatcacttgagcccaggaggcggagattgcagtgagccaagatcacaccactacattccagcctgggtaataaaatgagactctgtcaaaaaaagaaaaagaaaaaaaaagaaattcttacttttctgctgacttacaagtgcttgggctcccttcactgaggcttctgaaagaacagagtggctttggtatcctgctcatagggacagaactgctgaggccaagaaaaatgtttgtcctttctcctctgaaggtttgttaacaacaaaaaaaatcacccacaaaggagattaatgggagaaatagcatacatattcattcatatgtttatggaggagaaatacagagtgattcccccttcttgagaaacagtaagtctcaaagaaagagactttctttcacccccttttatccaggggtaagaacaactagctgaacaaaactgacagctgtcaatcaagtgggaagtccaaaactcatgagagacccacccagttttcaatcatcatgaaggagccaggggctcaatggcccctgctggtaccaagttgccaggtccctgcaatgttccagacaaagacagtgatggtaaaaagggaaaagtggaggtagaatgcaagtgcagcagcaggaagatatgggactctccattttagggtcttcaagtttttcagattttctgagacatgggttaactcttcaggttagtctcctagtaaaacacagccaaagtcccaattgtgtttgaaactttcaaaaatgcagattgaaagaaagcctcttactgtctttgagaagtccagactcctcttatcctcattgcatgcttcggagttcaatttaggtgtatctctcacatccatttctgtcgagcctttacctttaaattttaaacttgaaaaactgccagagtacctgatagtgattgatcagagacagagccaccgaattacccgatggcaggccttagagaccatggccttaggacctaggttatgcatagccctcaccttaggaaggggtcccttcaagggcaaataaaatgcgatagtccttgcaacactgaagcatggagtatcctgtgaggcatgaacttgcttgatgcagcatgaatgcaccccaagaaacatgggcatgcccctccaagtgcaagcataccccacaagtgggtagccatagagccagaagggcaggttccctgaaaaaaataaagacctcaagacctcatcctaaatgtgagatcttggatgtaagaggatttactgatttttccacaaaacagccaggccaggaagataactgagcttagaggactcttgctggtgccaatgcattgattagtccagatgacaagggagaggatcttgagagccaattttgatcccttcctcatcaccaggaaatatgagtaaagattgtgggatctgtggaggacagagggagagcttcattttctataaaacacagtctgcagattgaggagatgcagcctcggaggtggagagctataaagtcaaaaaccacagagcaggatagaggagtcagaggagtgaagaaaagagtcttgattagacagcctttaagccccaagtcacatgtctcttaattggctgttcctaggtggtcagttagttcttaccacatgatctgttggtgagcagttggaaaattcccaggtacagattttttcagaaaatgttatttgacttggctacagaaaaataggttttgcaacacttactaagaacacagagaacatgaccatcacctaaacctgccatggcctcttgggtttgtttttgcttttgaggcacagggagtccttcttgtctgtttacctggaggcatgatttggcaacctagataacaaacagagataggctttctaaaaagaattatttttatttgggaataaagcattgcaatgggaatatgcgtgccaaggtaaactatgtgcttattcaggtaggtaaagtaagacaaagtttaaaaaaataatgagaaggattacatatttgttttggaatgattatccttggctataaagatcaataacaagactgacatcagtttgaggttggacaggcagttgctgggcagatgttcttgcagaagtatttttctttaggttcctgagaatctataacctttgggcttaccaatagcagtgactgatttgtttactgattgttcacagaataggaaatcaaaggaggccaaaataaggacagccataattatttgccaattgtcaatttgaaaagggtacccaaatccctccatatgaggagtagcataagtggcttttctactggctgccgctgtagacccacctccttctccagcacataaatatcgctgttaacattaactaaatcacctctgggcagagaaacaaagytctatatgcacagcccagcaaagagcagcacacagctgaaagaaaaactcagaagacagagctgaaaaagaaaactggtgatggatctcattccaaactttgccatggaaacatgggttcttgtggctaccagcctggtactcctctatatgtgagtaactatgcaggcatgtttgctcttaactctaagacctgaagtgctaattgggcccatctttttcttatttgttttgaagataaaagagataacggaggggaagttacctaagtgccaaatactgtgaacacataaaatattattaatatgttaggactcctaatacaacatttgaaaatgtaaaatttagtctgggtgcggtggctcacacctgtaatctcagcacttgggaggtggaggcaggccaatcacaaggtcaggagttcaagaccagccagaccaacatggtgaaaccccttctctactaaaaatacaaaaattagtcaggcatggtggcacacacctgtaatcccagctacttgggaggctgaggcaggagaatcgcttgaacccaggaggcagaggtttcagtgagcggagattgcaccactgcattccagcctgggtgacagagcaagactccgtctcaaaaaaaaaaataaaactttgtcatactgagtagtttgaactaaagaagactgaaagacttcacaaatgtcttcagaatctctgaccctcttctgtctacccatcccccattctttccctcctgaagtgcagggttgctctgaagttctcttatctgactaagggaagatcttccaaaaagaatgcaattgtcttgagcctctccaaataatctcatcaatcagaaaactaattcacaggaaaagagaaaaagtttgataatacttattctttggagcactgctacctgagagactttatctccacaataaaataacctttgttcatcatgtgttttctcccttcaccttcccataacttgtgtcagaaactccctatcagaagccactccctactttttagcttacaatgctatttaagctttactcattcagtccttattttagtctcatatattgtgggcctccagcacatatgcatgtaaaattttgtatggattttcactgtaaccacccaagrgattcaccttgccccctgcctcaacagagcccattcatcaagacaggggaattgtaatagagaatgagttaatacatgctgccaacaaaaagagccaaactctgtacaatacttgaagagatttattctgggccaaatatgagtgaccatggcccatgacacagccttcaggaggtcttaagaacatgtacccaaggtggtcagggtgcagcttggttttattcttttagggaggcatgagatatcaaatacatttaagaaatacattggtttggtccacaaaggcaggaaatgtgatttttgcagaattctttgtgatagagcagactccagagaaattgcaacaacttaaagtctttcagatctggccctaaggagctataggagagaaaaaaaatctgtcagatcaccattgcctacctctactccaactggagctgtttcaaaaccaacatgtagaaatctttttgtctggctgccctgtgaactcagaaactagtctgctaaatgattaacttttggtctccttttgctttggtagaatgacctcttattaagtacctgtttaactgcaccatatacagacctatctttcatgacagcagacctgcaacatcacctcctgaaatgaggcacagctgtttaactggattgacattgctaggaatgtgagactggtttatactggtttaatgtgattccttgcgactcagctaccaattcaattgtcctctccacaagcatcaactcagctttagtatgtacattttctagggaagtttatgacaggggaaagttggggctccaaaaatgaaaccccaaaatatggcacttaagcatgttgaggactttgaaccaaaggaaattgaaaggtctcagaaagtcttcagaaccaagctaactcttatgttctcctgtctcccaaccctgctatttctcccaaaatataggaaggggctttctctgaagttctcatacctaaaggaagatcctcctaaaaaaaagcaatggtcttgagccccctccctataatctcatgaaaaagaatcttagcagggccaggcatggtggctcatacctgtaattccagcactttggaaagccgaggtgggtggatcacgtgaggtcagaagttcaagaccagcctggtcaacatgatgaaaccctgtctctactaaatatacaaaaattakytgggtgtggtggcaggtgcctgcaatcccagctactcgggaggctgaggcaggagaatcgcctgaaccctggaggcagaggttgcagtgagccaagattgcgccattgcactctagcctgaacaacaagagcaaaacttagtctaaaagaaaaaaaaaagaaaaaaataatattagctcacagaaagggagactaaggttgataatacttgttctttggagcactgatgcctgacagacattataataagatgacttttgtttatcatgctttttcttccctcactctctcatgtcttgtgtcacccactccccatcagaagatactacatttttatagctcagaatgctatttaagcttcaatcatcaggccattctttgagtatcatatctttcaaggctcccatgcatattcatgagataaatttataaggattatctcctattaattgatctactgttagttcatttctcagactcaaatatcaaacctccatagaggaatgttctcttgaccctacagatgttacacagatccgttgaagaagtaaataaacattatccacctcctcttcattcaacttccaatttctgttactaagagtgtttactgacatcattcaatcctggggatgctttctgattgactatgagttttgatctacctagactaacaaccagaatttagcatgggcagataatggattataaacaactggaaacccaagaggttattttcgatgtgtgagtaggaaaagatccccaaagagggaaccaagctaacagctgggcctggccagggtgccactgtggggtccttcaaacacattctcttcatgcaatttttcagctttatcacattttataagatttatttatttgtactgaatatttaggatctaagaaaagctaacctataaagaagagaaatcaagtttctaattcaactgtctggaatattttatggttacttatgctatgtagcacagtgaaacttttctatcaacagaaatgttcctgaattttggaagacctctctttcagctgaaagcacataaggggcatttaaaactatttatgcataccataattttcagccacactttcctaacttacccttatagggcctactttgtggcaccagcagttgcatggttacatcggcgggatgcagcctctctttttcctccagtcttccatccctcagtaacaccagagtgggaagttctgcaaggatccagaacctgcaattgatggagttcacacataacccatcaaagatgagttgcaggcaggcctgccataaggagcaccagacttaatgggttttcctgcaggatagttgatgtacagaagcagtaaactgactctgtgtgactgatcattttgagaaaaaaaaaaagtgagcatgactggcattgtgcttatcaagtaaggatcaccagttggagggccagattgcacaagaggaggaatggccttgaaatttattctttagtcattggttcctctgcatagtgccattcagagaacatataggtcaatcacatttactgtagtttatatcaatcaaatcatctgaccacagagatttgggtgtagctggaaggtgctcacatttctatgaagccagtggaagccttgaatatggttgtcattccatagaaataagaacactatgattcttccagagctcctctgtgcaggaatgtttaaggatggccagatcctaaaacaaggtcagtgtttagagggaaggaaaagcataaacacctctgagaaaacaggaaagaaggtgtcagcaaagggcctcagtaaccctctgtaattcaatggatgtagtgatrcacaaactcattattagttcaaaagataaaaaaaaaaaacctcacctagtgatatggtttggctctgtgtccccagccaaatctcatcttgaattgttatccctatgtgtcaaggaagggacctggtgggaggaattggatcataggggtgttttcacccatgctgttctcatgatagtgaatgaattctcacaagatctgatggttttaaaagtgtggcacctcgaccaaacaccgcatgttctcactcataggtgggaattgaacaatgagaacacatggacacaggaaggggaacatcacacaccggggactgttgtggggtggggggaggggggagggatagcattaggagatatacctaatgctaaatgatgagttaatgggtgcagcacaccaacatggcacatrtatacatatgtaacaaacctgcacgttgtgcacatgtaccctaaaacttaaagtataataataatagaaaaaaaaacaaaacaacaaaacaagaaaaaaaaagtgtgacacctcttctctctctctctgtctttctctctctcctgcctccatgtaatacatgctttgcttccccttcaccttccaccatgattttaagtttcctgaggcctccccagccatggagaactgtgagtcaattaagcctcttttctttataaattacccagtctcaggtagttctttatagcagtgtgaaaatggactaatacacctagaaagagaatttccaaatcaggaaagaatcaattaactaaatagacatacgtgaatgaaatgccctggaagaattccagtctgaacctcttaagggcactcaaatttgggaacatttattaagcattcactctagcactgggatcatgcagacttcagctgcttttagttaatcattgtgactttttggggtctcacagaggaggcagcaaaaaagatgaggattgaaatgtagtgggattttaaggaatcagagagactgatggggttcaggaggatatttattaattatttaggtgcaccagcccagtcggattaacatccagaggactgagctctgaacaaagagtttagttaccttttaagcatttcgtgggaggggggagatctgtggagagggaagcatactagagaagtaagaaacaaacacagttattcaattgagaaatgcattacatcatttcttacatttcaaggaaaaacacgttttgtgacttgagtttatctgtctagtgaccttgcagctgcacagctagggaaacagggtctttgcaatgcctgggaagggaggagagataaggctcactagcctcagaaaaacaggcagttagtttttaaaagactccagctctttctctttttcaggggaagttgggtttttttcatatacaactcagtttctgcttacgcactctttaatttcttttaattcctgttccattgtcccctttggtgctttttacaacagaagtgttaatagaaagcaccactatttgccacctcctcgcggagctgagctttttcttctaccggcagcagctgatatctggttaatgccacaactgtgcggtagcgtgtcaggctactattgcctctatagttgactgaatactcctaataaacaggggtaaaaggcaagggaggatgaggcaaatgccaaaaataagcaagaactcactaatgagggttttgaattctccaaaggctgacaaccatcctccaaataaggaatccagggaccacctggaccaagtctgaactagaacatgtgccatcttgcacattctagctgtgattttcatgacagctaggccattatcatcgatttctaagcaacaattggttaaattaaatttttcacatactcttccttctgaggctaagaggaaatctaaagccagcctattttgatatatagcatttctcatttgtgttgcttgtattgccaataaatctagtgcccttgatgttttattggttataatttcaaggactgcccgcaaccttatgatgcagttgagcatatagatgggggtacggtacccccatgacctttcttgcacctaggtagctggcctatagtatttaatgattctttcaggaggccatttgttatctttccagtctcctatgtccacatcttttttgatatttgtgtttatttttgtgattatgcctcttctagttcttttattttcatcataaactggatatcctaagagttcccctggctttagaggaattagaaagaaggatggcttgattgtttctaacacacattcccctgtccatttagtcagcagctgatatgcctgtgctccacaggtccaatataggccagagggtgctttctaagcatttggagcctctagccgatgccaagtgcggcttagaatagacagtggagggaaagggttttgatcttgtaagtaggagttgttctgggcatttcttcaatagagttttgtttttagtctcatcataatactgttgccctaggcagattgtttctcctactgcccctgtgaaagcctttcctcattgggcaatacagtactttccaattatggaggtttttaacaaccaaacactggttgaggctgttggttcactggtagggttaagcgaagtgaagttattttgtggcattaattcctttgcctcccatggccactggtcccccatattagttcctccacatacatagcatgaggaaattcctaagctgccagctatgttttcagctagttgagcaaataagtttttggttgatgggggaagctcgggcaccggctgatcaaaatgcttatagaatgacttatgaacccagaattgtggggttggacacatctgagttcttctagtctttttgacaatcagtagtggaattctaaggcctgctccttgcctatcaactcttaatagtgctgtctgtcctgtagaccaaaaaggtagctctggctttaagatagtaaaatttaaaggattgcatgtctttgtcttacgatctggtttggttgacatactacttagcagaacagtcttccctgaatataggtgttggtgttgtgtcagtgtagaccacttaatgttacagtctgggcatccgatttgtcattctctgtacagatgtttaggactgctgctgataagcctctcgtgycaaaccattgcagactgcttctggttttttaggattatgaacatatgcggtatggtaggcatcaaaatacaaggaaataggcctgttatagaggggaagggcttctttggtttgagctataagctctccttctttttctccctctgatttaacatgtacctcaagccagaattcatagggtgagagcttagggtcataacatacatatagctgattatttcctgggtcacagactgaataggtggtctggttgtatgtgcaggtttctaacttggttcctgcacattcatagtagttatggtacagtagagttttgactatggtattccttacccaggtagtgtgtacacagtgtgggcatccttctagagatttctccccttttagtgtaggcagaaatggtaacaacattagcgtatgtaatagaaacatgcttacactacacgtgggaatggcaaaccttcctctgggcatagacatttgcagcatttgcagtaataacgtaacaacagaacaatcagtactgacagaattataactaggcttgtaaattgtatccacatttacttatccagagatggtactcttagcttcggctgtgcatagactagtcagcttccgagatgtaactagagcagagcttgcaggaatccccaaagatcagccgaaatcaattattcaggccccacctgaggaaagggaatgtccatccccatgtgtgccagtatayctgtctttggtcagaataaggcaggaagcagagtcaggagcacccgraaagtcaggcttggaagaaagtgaggctcagtcctttggatgttaatctgactggcccagtgtacctaaataattaataaatatcctcctgaaccccattggtctctctgattccttaaaatcctgctataaaatgtaattattgccatcagagtttctgttgttatttattgcctccatgttacctccctcccttgaacattccagttcctgaggtaatgtctggccaaccccttatctataaagttacaatttctgtaacctggctttctcttttattttatagttatgggacccattcacataaactttttaagaagctgggaattcctgggccaacccctctgccttttctgggaactattttgttctaccttagggtaagtgttatttgagctccctcttttgcttcttatcgatgcaaacccaagcttagtcctatcagtaaaaatgctcctcctcaggaggaatttccartgttttacactttcagaaatggtgtgtatgctscacccagagcagggccaggtttataccaggactctcatcttaatggtcagggggtttgggtttgcctcagttgcacggcacagatatctgggggatcagcactcgatgttcaggacttgatgttcagactttgcgaaccataaagaggactttccttttgccctgtgcagatttttgagaagctacagttgtccttagtattaagagaaaagcagaaatggggaaatgggagccccagtagcgctcattagcatcatgtaccacattcaaactttcctgttttcaccaagagctttagtaagcttttgtttccttcctcctgtagagctttgaaaattcagttcattggctgggcgcggtggctcacgcctgtaatcccagcactttgggaggccgagacgggcggatcacgaggtcaggagatcgagaccatcctggctaacacggtgaaaccctgtctctactaaaaatacaaaaaaaaaaaaaaaaaaaattagccgggcgcagtggygggcgcctgtagtcccagctactcgggaggctgaggcaggagaatgrcgtgaacccgggaggcggagcttgcagtgagccgagatagcgccactgcactctggcytgggtgaaagagcgagactgtgtctcaaaaaaaaaaaaaaaaagaaaagaaaaaaagaaaaagaaaattcagttcactaggcagctatttaccgctggataatttgcacatacttgaattctctcaagaactgttaaattccctgcaggtagttccacagttgtgctccagcttcttctccccaggatgtattttacagatttgagaggaagaacaagaaggttctgctttcctgctgcttttcttcaaaggcagcaccctatgagtgagcctgagcwgggagtgcttataatgaagacaatatggaggctgtccatcaacttcagatatttaaccacaaaatgagttctgtttttttttaaaagaaaggcaaaattacttaacaaaataactagaaaggggataatttgacaaacttattcaaaatttaattatctaaacaggaggtaatatgtgtctcatagtcttcgaattttgactgagccttgtggctaccctggtctgatgctccaccaagggcctggggccatgatggaaagtcacaagtgcgtgtccacatggccagtaagaaagcctgtgtacaggttgctctctgactcaggttttctgtcttacagacctgaggcttgtttttcagattctaattctcccaactgaggccttcattgcaaaattaccacttaagaatttcatccttttttaccccccgaaaaagcaataattttctcttcatatttcccagatcgatcctttagtaaatccacatgtcctgggctatatgttgcctagttagaacatcaaaactgaaacaaggaagcaggaargtttgtttttaagtgtcagaagtgaaaactctgagtgagtattgtaatgtgctgtgtctgacatctagaggtggcatttcccacacttattatgtgttaagctggaaaactggaaagtgagtccactctgtcatttgcccactcactcattttctcrctcaacaaaatgccttggacttttatttaaatctgctagactaaaagtggtccctgatgtttttgactttctaattcagctagaattctagagagaatacatgagataaatgaaaaggatgctgaacaaggagataaaagattgcacattcccttgagacactcactcactttccgtcagcctcggtttcttcatgttcccatggtggtgataattcaggggtttatgagattgcagagacaacatatgcagaaatgaaaacacatcagaaagacaatgagttgcttagtgttcatagacaraagtaagtcattcaatatctacactagttagagaaaatttaaaagtgactttaaattctccatttcaaatatcttctgtattttctctccttttccttaagaggtctctgaataagattcccagctgggcgtggtggctcacgcctgtaatcccagcactttgggaggctgaagcaggaggatcacctaaggtcaggagttcgagaccagctttgccaacatggtgaaaccctatttctactaaatatacaaaaattagctgggtgtggtggcgggcccccataatcccagctacttgggaggctgaggcaggagaagagcttgaacccagaaggcagaggttgcaatgagccaagatcgcaccattgcactccagcctgggcagcagaaaaaaaggaaaaaaaaaagattccctctaactgccagtaaatggtagcaagcctaatggtagcaagtcattggatttgacttttttgccctggttaaatgtagcrttcagtacattcgaaataatacttgaattgtattttgtttcttctgccagggtctttggaattttgacagagaatgtaatgaaaaatacggagaaatgtgggggtgagtattctggaaacttgcattggatagagctgttgctatgctgagttattttactgcagagagaacaatctcagcccagattttgtttggataatgctattgtcaacctaagtaacaaacagagagaggctatctaaaagaaaaagatgatctgggaattgagcattgcaaggggaatatgcgtgtcataggaawctccatgcatattcagtatgtgaacaaaaataaaatctttgagaccctaaactcactatgacaaagggaaaatcgagcttgagaattaagtcataccttactgccttccttttttccccagacagatagctgtaatttcacaaccctgggtaatagcttcatacataagccacattcccacaacaatagcaatgtggcatcactcgtctggggtaatacccgaggtttgttgtcccacagatatagggggtctccctatagtggacgcacaaagartaaggttaagagcagaggttggataggtgaaagaaagagaaaagctctctcctgccgagagagggggcccccagtgggtcttctgacctgcggtaaagtgcaggaggttttatagatgagcttgaggaggcagtgtctgatttacatagggcatgaaagattggttggaccaggtgtgtcatttgcatagcacataaaaaactggttaggactaggtgtactgtttgcataacatgtgaagaagttggctgccccaccctaatcttttattatgcagatggttctcttcctggctggcaccatgttgcctgctttttttactgtaaatggggtgacaaagataagggaagatggggcctccatgttgaacataaccagcttccaaggtagcccttttctattggcacagctgccagcatttacccgtgcaagcttccagcttgcttatcgatgtctgcagcttgattttttcaggctgctctttgttagaaaagaaatgatttggggggctgctttttgttaaaagggaagctttgctgaggacccctttgccctcactatctgcctaaataatttttttctggctcctatatcaatagaaggctacatatctttctggatggtttccctcacaagttgctcacatggaattctatacatctgccctataaaccagccctgtcattgagttctgttgactcacaccttgatcatgtaaattaccagcttatcacaggtacagaataaggacaagaccagaaatcatccctccacctaccttgagatgaatatgtaactgacttttcctctactctttcttttcacatgtatatctcatgtaaaatgtagattttctgagtacaacatgaatgcataattgattttttcctctactctgtcttttcacatgtaaagtgcaggttcgatgagagctaattggtgccttacacaaatgtaatcatttgccacactgcctactctttccccccttttttccttcctgctggttctttcctctttaaattcggaagttcccaaaaccctctttggaaaaacacaggtcgcagctacccctgtggctcatgtgtttccaggtgtcccctcaagytttgactcaataaacctctatcaatcaagacacctgcctcagtcactttttggttaacaccttggtaaccacaatgggattcactgagggcagtttggccctcagcctgcagaaattttcccatcagtgtgatagaaccagctagagctttttatcactctaaccaattggctcatgtgctgaggtctgggagcttctccttctagagatccttgatctcccataaaatgttgcttgagacctgaattttcttctgccatagagctcctttctgggagtttttacttacttccaacaaggaaggtgagttttctgcttccataatgatgaacagtttttagcttgagatccgtctccacataaggagccgatgtggcttttcattttggaatttggtagctgagggtcaaggtttattgtcagctagctataacttccccttatgcttggagatcttgaccctatgtaaattgtgtgataactttctgttttgagtttcaatctaccttccactaagttttaccaattcgtggccccctctaatgtttactggaatgcccacagctacaaaatgtcaattttcccctctagaaaccccagccagttaagaraaatcaatatgcaactcaaaatatatttctttgacacttttctttttttgagatggagtcttgctcttgtcacccaggctggagtgcaatggggtgatctcggcttactaaaacttccacctcccagggtcaagcaattcccctgcctcagcctcctgagtagctgggattataggcactcactaccatgcccagctaatttttgtatttttagtagagacagggtttccccatgtttgccagctggtctcaaactcctgacctcaggtgatctgcccgccttggcctcccaaagtgctggtattacaggcatgagccactgcacccggcctacacattttttttaattgagatggagtctcactctgttacccaggttggtgcagtggcaccatcttggctcaytgtagcctctgcctcccagtgatcctgccacctcagcctcccaactttgacacattttaatgtggccttaccagaacttcccttgtctaaatctagggaagagtagaaaaggatctgacacatactctgagggctactacctacgaggttttctttgcataacaaggccaccttcccagcctctctctctctatgtgctgttataataaatacttcattagaaattctaattgtcaatgacaaaatagtgggagcctttgaattaagacttctaaatttaaaattttagtgaccttttattctaaacaattaattaaaagatcaaattttttaaaggacttataaaatggtcatgtctatccttaaaagttatcttctttttctatgcccattttctgccaaactaactctgcaaaggaaacttgttaatttacartctccctagctatataaaaaagtatcctttccctccatctttgccaatctatgcttttaaatgtaatttttgccattttaataaaaatggcatctttttagtttgcattttcctgacttctaccaatactgaggaacttcccatgcttatcattgtcaattactcattcatattactgataattcagacttcatttcctatgaattgcttattaatatccttttctcacttatcaagtaaatccttcatttatagaagttttatagattctctatattaactcttgtacaaatatcttctcttagtctctttcctgtcttttaactttgtttacggtatcttttcatacaaaagttttaacactttttacgtaataaaacatactgtggtcctttatgaaaaaaaaagttatcttgactaaattaagagcaaaaatctgaccaaactcactatgccaaaatgaaaagttatggttggaaactgagtcatgcaatactgccttcctttagttcaaatcatatagctgtaatttcacaatgctgtgtcataacctcataagaaagccagattcccaaaatgatagaaggccacatatctccccagatggcgtccctcgtaagtttctcacaaggacgttccttatgagtccctaaatcttttagkatacatatcctccttccccccatgaaccagcccttaaaaccaagttctgttgaatctcacttaccctgacaatgtcaatttccagtttaccttggcaggcacaggacaaggacaagaccaagaaattatccctccacccaatccaagttgaatgcgtaatcgactttgcctctattctctcttttcayatgtttgcattatyttatgtaaaatggagatttctttatcacaatagaaatatataactgactttttcctctatgccctcttttcacatgcaaaatgcagatttgctgagcacttctcagagcctcacaagaatgtgaccatttgcctcactacctacacactctccttcttctctctcctgcttgctctttctcctttaaattctgaagttcccaaaaccctctttagaaaaagcacaggtcacagaggctcctgtggctggtgttcttcccagatgtattctcaaactttggctaaaggaaactattaatcaaggctccagtctctgtcactttttggttaacaagaagataaaagaagacagtatttttaaagaaaataatgaagaggattacataactgtttattttatttttttttattttgagatggagtgtcgctgtattgcccaggctggagtgcagtgatgcgatcttggctcactgcaacctccacctcccgggttcaagtgattctcctgccctggcttcccaagtagctgggattacaggtgtgagccaccacgcccagctaatttttgtatttttagtagagatggggtttcaccatgttggccaggcttgtctcgaactcctgacctcaagtgatccacccacctcggcctccccaaagtgctggaattacaagtgtgagccactgcacccagcctataatgaaatattttaaacatacaaaagattatggagaatggtatagggaatgcccaagtatacaccacctagatgtaacaaaggcttctgatatttctaaccatgatctctttgaagagctcttttgtctttcaatgactctttcctgtttgagccacatcacccttcgttgtatgaaggcttaagtggcttccgtggtgagaatcttactctgtgtcataccctaattgaccttggagctggctttgctgtgtattgcacaactgcaagtatggatgatggaatgtcaggatcaaaatctggattctttggtgtggttccagctgcagaatcaggcaagcgaggtttagtcagctctgttttcccccacacaggctgtatgaggggcaacagcccatgctggtcatcatggatcccgacatgatcaaaacagtgttagtgaaagaatgttactctgtcttcacaaaccagatggtaggcctatattttcaaatgtattaatcaaatttttattcttaaatgattatatattcatggaaacttgcccagaaaatggacaggaaagtgctttrtacttcgtcctatttcccccaatggtgatgtcttatttaactgtagatacagtgtatttctgtcactctagtaacagaaaattgccattgacacaatccacagaacttattcagagttcctgctttacatgccctcatttgtgtgggtgtatatgtgtgtgtgtagcattatgcaaatgtacccatgtgtataattgcatgactatcagcacaatatgtacagatctgttctagcaccaggaggctccctgctggtattctgttgttactatgtgtagcttgtcttttcctccttgcagggtctatagtagagaaaactttttttttatttcagtgaggccaatttatccatttttcttttatagattgtgcttttactgtaagtctgaaaattattctccaagcacactttgtcgctggtgttttttctaaaagttatatggtttaaggctgggtgcggtggctcacgcctataatcccagcactttgggaggccgaggtgggtggatcacgaggtcaggagatcaagaccatcctggccaacatggtgaaacctcatctctactaaaaatacaaaaattagccaggcatggtggtgggcrcctgtagtcccagctactcgggaggctgaggcagcaraatcgcttgaacccgggaggcagaggttgcagtgagccaagattgcgccattgcactccagcctggcaacagagcaagactcagtctcaaaaaaaaaaaaaaaaagttatatggttyaatgctttacatttaagtttatgatacattttgtgttaattttttgtcttaattttttgcataagatgtaaagtttaggtcatagttcactttctgtggcctgtggctgtgtgatttttccaacaccatttttggaaaggttactttccctctatggggttactttttcacaattgtcaaaaatcagttgagcagatttctgtgcatctcttttttttctttttctttttctttttttttaattgagacagagtctcgctctgtcacccagactgaagtgcagtggcgcgatctcagttcactgcaaactctgcctcccaggttcaagtgattcttgtgcctcagcctcccaagtagctgggattacagctgtgcaccaccrtgctcatctaatttttgtattttagtagagatggggttttgccatgttggccaggcgggtctcaaactcctgggctcaaatgattcacccacctcaacctcccaaagtgctgagattacagacgtgagccaccacacctaacctgcgcatctgtttctcattcactgttttgtcccattgatcactgtgtttattcctccaccagtaccacattgtggtgacaatagtagctgtacggtaactattaacatcatgtagagggattactcccactttatttattgttttagttcttgtttttgcttttttttttttttaagacggtctcgctctgtagcccaggctggagtgcagtggcatgatctcggctcactctagcctctgcctccctggttcaagcgattctcctgcctcaccctcccaagcagctgggattacaggcatgcggcaccatgcccagctaatctggggtatttttagtagatacggggtttcgccatgttggccaggctggtctcgaactcctgaccacaggtgatccacctgcctgggcctcccaaagtgctgggactacagacatgagccaccacgcctggccccttttcctttccataaaaattcagaacaagcttgtcaatgtctacaaacaaacctgctgagattttgataagtattgaattaaacctataagttggtttagggaaaatctgtatctttactacattgagtctttcaaaacatgaacatagtatccctctccatttctttaggttttcttttagtcctttcatcaacgttttgtaatttttagcatagagatcctgtacgtgttttgttagattcacacctaaagtatttcattttcattgacatgtaaatggaatatttttactgtattttcagatagtcattgttatggcgtagaaatgtgattgatttttgcatgttgatcttgtgttctacacccttgctgaatctcactttttagctctagaagtctttttgtatattcctagaaaggttctacattgacatttatgtcacccgaaaatagaggcccttctatttcttgccrtccaatctgtatgcctttaatttttttctcatctatagcactgagacatccaatatgatgttgaataagaatggtgagagtggatatttttgtattgtttctgatcttggaggaaagcattcatttttttcaccattaagtgtgatttagctgaaggttttttgtatatatttttttccatgtttttcagaatatcaaattgaggacgtttctctttttcctagtttgccaggttttatcctaaataagcattgaaattatccattttaaaatacagttttgaaagatggaagaaggtttcaagttattggactaataggcctgtcgcaagttgggaaatagcattcttttctttatttttcctctaatcctggggggaaaataaaagaaagggrcttttcatgtaattgcattgtttcttcaaagtgcattcttagtcttttgcttattactaatttttttttcaaaagtcactaaatcaaaccacccctttgtcaagtttctcatgctataggtgtattaaagacacagctgctctgaggcaacgtacaatctgccaaggcgacctgcctatctgtcaccagtccctttctgctttgcacaaccctggaggagttgctaggtcttgttcccatctattctactggaagaactggttctcttccacgtggaaaccatgcatttaaaaggaaactgggatatagtgactggaaaccacaccatttgccttgattccaccatcccccttccatatgcttacaggaggctacacattcaagataaatctttattgagcatctagtatagagcctgccacccagtagatagttactaaatatttgttaaattcatgatgcctgtttaacacattttctacaactatggagatctctaaaacttacgtaggacaaactgcttctgctttgaactcaagcctttaggtccaatgggatttctgaaaagtgccttaagttttgctgaagatgaagaatggaagagaatacgaacattgctatctccagctttcaccagtgtaaaattcaaggaagtaagaaaataaggtgatttataattagaaacttaaaggatgaatctggagacaggtagtaagtatcatcatagttcctttctaatgggtagtccactgagtttgagctttctaaaaagggtcttttcagctgggcacagtggctcatgcctgtaatcccagcactttgggaggccgaggtgggtggatcacctgaggttaggagattgagaccagcctggccaacatggtgaaaccccaactctactaaaaatacaaaaattagctgggcatggtggcggatgcctataatcctagctgctcagaaggctaaggcagaagaattgtttgaatctagaggcggaggttgcaatgagccaagattgcgccgttgcactccagcctgggcaacaagagcgaaactctgtctcaaaaaaaaggggcagggggcggtcttttctatttatgtcctagaggacatggtgagtcattacaaaatatcatttactgttccatgctgggcaaagccatgtccttctgagactcgagtctgcgtagttaactatgggtggtgttgtgttttagatkgtccccatcatttcccaatgtggagatatgttggtgagaagcctgaggcaggaagcagagaacagcaagtccatcaacttgaaagagtaagtagcacagtcttgaggttctgagctgtcatgagcccctccagctgcctgcagtggagctgatattcccactgttgggttactccagtgatcrgacaaaagcagggctgtggtgttgcaactccaataggccacccaagatggtgttgctcacaaaagaaagctaggaagctgagagaaaaggatcttctcccctgtgcacaggagccaggaataacttatctgttacattgtccccttggatattccaaaagaataatacattgtgtagaaagaaaaaataaaaacctgattgtactaaagttttgagcatagacgttatggagtggtgggaggggaaggtrtttgatagctgttggctggcagtgactggggcaggaaagttacaatgaggaagttggaataacttcaatcccttcattattttgctgaggataccaccaaaatatgaaatattaaaccttcccaccacttctaatttcttttctccaatcttaaattttaaaagactctgtaaaggctataggtagggcaatgctattgtttgttgtctgaactggaatgtaatttgaattatgctggaacaacatgtgtaagctgagcctgtcctgggcagactgggracatgtggtcactcagctatgggatgccccgatcaactttggagtgatctatttgtttaatcaatatcactgttagttcttacttttacaaaaataatctgccctcagagcaacctcagatcccaggagttggggaaaagcaggtgtttcaggaggcttatcagggagtgcagcggagacatgacgttcacagcaagtctgaacagggtgtggctgttctataaagtgctgaagagacatcagctctgggcgtagactgtggggtctggcaatgtcaaatttattgattggccgagaargagttaattattttattcttgtcctgcagaagcacagtgttgacacaccttttaccatccacactcaacacaaactactgtaattgtctgattattgggtctgtgtctccctatgactgaggtccttgagctcagaggtgggtctaactcaccttagtgtctccatcactcccagcacagggccagctgcatcactgatacccaataaatgcctcatgagtatgatgggagatgatgcagcagrttgttctgattgtgtgtgggttttcacctgtcttgctctggcatagcacttcttgctgtgtgtatagcagaaggaargtaaagaggtgctggttttaattttccatgttttactctactcagtttctttggggcctacaccatggatgtaatcactggcacattatttggagtgaacttggattctctcaacaayccacaagatccctttctgaaaaatatgaagaagcttttaaaattggattttttggatccctttttactcttaatatgtatgtggacttttatgttatttctctctctctctctctctcatctaatttttaaaaacagttttattgaaaacaaaattcacataccatataattcacctasttaaaatgtataattcaatggtttttggtacatttaaagatatgcacaaccaacatcattgttaacttctggacatttttgtaaacttctgaacattttttgtaaactcagaaaccacataccatttawccatcatccccttccaatcttcctcaccatttttttttttttttttttttagacagagtctcgctgtgttgccyaggcyggagtgcatggtgcgatctgggctcactgaaacctccacctcctgggttcgagtgattctcctgcctcagcctcctgaggagctgggattacaggtacacaccaccacgcctggctaatttttgtatttttagtagagacggggttttgccatgttggtcaggctggtctcgaacccctaacctcatgatccgccctcctcagcctcccaaagtgctgggattacaggtgtgagccaccgcacctggcctttttttctttctttctttctttttttaaacagagtctaactctgttgccaggctggagtgcagtggctcaatctcggctcactgcaacctccrccttccaggttcaagtgattttcctgcctcagcctcccaagtagctgagactacaggcatgcgccaccacacccaactaatttttgtatttttagtagagacggggtttctccatgttggccaggatgatctcgatctcttgacctygtgatctgcctgcctcagcctcccaaagtgagccaccatgccctgccttcctcaccttttttatgttgcccaggctggtcttgaactcctggcctcaagccatctttctgctttggcctcccaaagttctgggattacaggagtgagcaactgcacacagccccaaaacccccctcagctttaagcaaccactaatctactttctgtctctagatttgcctaatctagcacacatcatataaattgaatcatataatatgtggtcttttgtgactggcttctttcatttagcattacattttcaaagttaattcatgttgaaacatggatcagtayttcatttctttttatgaccaaataatatttcattgtatagayatgctgcattttgcgctaggtgtagtggctcatgcctgtaatcccagcactttgggaggccgaggtgggcagatcacaaggtcaagagatcaagaccatccttgccaacttggcgaaaccctgtctctactaaaaatacaaaaattagtcaggcatggtggcgggtgtctgtaatcccagctatcaggaacctgaggcaggagaatcactggaacccagaggtggaggttacagtgagcygagatcgcaccactgcactccagcctggtgacagagcaagaccccgtctaaaaaaaaaaaagatatgctgcattttgcttatccattcatagttgatggacatttgtgttgtttctacctttcaactattgtgaatagtgctgctgtgaatagttgtttacaagtttatgtttgaatacttgatttttcttcttttaggtatatattcagcagtggaatggakgcgttttatagtagtaattccatgtttcacttcttaaggagtttctaaactgtttcccacaacagctgcaccattttaccaggagcatataatggttctaatttctctacattcttgccaacacttggttttctcatytgtttaaattatagacaccttactacatgtgaactggtctcatcgtgattttgatttactcttctctaatggctaataaaattgagcaacattggccatctttatatcttctttagataaatgtctgttcaagtcttttgcccatatacagctgaattctttttgttaattggtaagagttctttacatattctacatacaacttccttctcaggcatatgatttgcaaaattgttctcccattctatacatgtctttttactttcttgatattgttctttgaactttatcttctttgaactgtatcttctttgaacttctttgaactttaattttgatgatgcacgatttgcgtatttttcttttattgcttatcctgtaggtatcaaatctaagaatctattgccaattgtgagctcatgaagatttgccctcttggttttcttttaagggttgtatagttttagctcttctgtttaggtcttcgatgcatcttgattttcattttatatgccgtgtgacgtaagagcccagctttattcttacacttggctatccagttgtccyaggaccatttgttgaaaagacgattttgtccccattcaatgatcatgacaccttcctcaaaattcagtggaccagagacatgtggatgtattctggactgtaaattctattctgttgaactatacttctatctttatgccagtatcacattgtcctgattattagagctttgtggtaagttttgaaattgggaagtatgagtcctgcaacttgattctttttcaacattgttctggctactctgcatcccttacaattccaaatcaattttaaaatcaacttgtcaatttctacaaagaatctagctaggattctgataatacattaaatctgcagatccatttgagaagtattgccattttgacctttttaagttttctaatctgtgaacacggggtggtgattccttttatttagatactctttcatttatttcaacagtgttttgtatttttcagagtctgggttttgcacttttgttaatgttattcctgataagtgtatcactaatattttgatgttatggtaaatacaattttttaattccacttttggattgtatattgtaacgtacagaaatacagtttatttctgtatattgaccttctatcttcaaatatttctgaacacatttgttagttttaataggtaaatagaagtgctgagagaggtatccttgtctcattcatgatcttagggggaaaggtactaagtatggttagctatgggtttcatagatgccctgtatcaggtggaagaattctcttctatttttagttgctgagtgtttttatcacaaaagtcttttggatttttgtcaaatgcttttactcatactgagacgattgtgtgttttcatttaattgacatggtatattacacaaccttgtttccctggggtaaacccctcttggttatggtatataattatttttatatgttgctagattgatccagtttgctagtattttgttaaggatttgtgcatttatatttacaagatatgttagtctgtagtttctttatcctgtgatatatttktccagttttaatatgatggtaatactggccttatagaatgaatttggaaatgttccctcatttcctagtttttgaaagtgtttgtagaatggatattaattctcctttaaatattaggtagaattcattattggaactatctggcctggccttttctttgtgggtagttttgattactgwttcaatgcctttatatgttatagatctattcagattgtctgtttctttccaactcagtttctgtagtttgtgtctttcaaagaatttatccattttacctgttatctaatttatwcaattgttctaataataaaattgttaagagaatrtcyttatgctamtttttatttttcttaaatgtcaatagtaattatttcccttcttttatttctgagactagtaaactgagtcatctcttatttcttcatcaatgtagctaaaagtttgccaattttgatgatattttcttttgtggtaaaatttgagctttttttttgagatggacttttgctcttgccgctcaggctggagtgcaatggcacgatgttggctcactgcaacctccacctcctggggtcaagckattctcctgcctcagcctccagagtagttgggactacaggcatgcaatactatgcccggctaatttttgtatttttagtaaagacaaggwttttactgttggtcaagctggtctcgaattcctgacctcaggtgatccacctgcctcggcctcccaaagtgctgggattataggcgtgagccaccgcgcccagccttgagctttattttttatttttaacttttgtggatacacagttggtgtatgcatttatggggtacacgagatggttttgatacaggcatgaaatgtgaaataagagcattatggagaatggggaatccatcccctcaagcatttatccattgaattgcagacattccaattgcactctaaatgattttaaaatgtacagttattattgactgtagtcactctgttgtgctatcaaaycataggtcttattcattctttctaactattttttgtaaccttttattatccttacctcccccgcccccactacccttcccagagtctggtcaccatccttctactctctatgtccatgagttttgagttttgataatttttttttttttttgagacagagtctcaaaaaagttgcgtgatctaggctcactgaaacctctgcctcccgggtttaagcaattctcctttctcaccctcctgagtagctgggattacaagtgtccaccaccatgcccagctaacttttgcatttttagtagggacggggttttgccatgttggtcaggctggtctaactcctcacctcaggtgatccacccgcctcagcctcccaaagtgctaggattacaggcgtgagccaccgcgcccggctgatgatattttcaaggaaccaatttttggttttctttattgcttttaaatctgtatttcattaggttacactttagtttttattattttccccctttctgctggctttagttttactttgctcttcatttttcagtgtgttatggtatacatttaggttattgatttgagattatctgacattcacaactataaatttccctctgaacattgctttggctacatcccatacgctttggcatatcatgtcttcatttttcttcatctcaaaacaatttctaattgtccttttgctttctacttcagctcattggttacttaaaagtgtattgtttaacttccacatatttgtgagttttccaattctcttttctctctctctctttttttttttctttcgagagacattttcattctgtcactcaggctggagtacagtggcacaatctcagctcactgcaacttgcgcctccctggttcaagcgattctcatgactgggtcccaagtagctgggactacaggcacatgccaccatgcccrgctaatttttgtatcagtagagatggggttccgccatgttggtcaggctggtctcaaactcctgacctcaagcaatctgcctgcctcagcctccctaagtgcaattctcttgcttttattgatttctagtttcattccatggtagttgaaggacatttgccgtattgtttctatcctgactactatttcatggaaaaacatgattcattaaagcagcaggctatccaaagagactctagtccagtagataaaggctaagaagtcagggaatttaattctgttcctttggtcactctgaagatgcagaagggaccactgatctcactgctatagtggaggcccctatgtgtggatctgctcttgctcagccattggcatggaagaggggcaaaggtcatacaggaagaggggcaaaggtcatacaggaaatggatcctggttgagaaccctgaagtctataggtagagaaaattgtaattgttgtaggtaaatttcacatttttcactatgatttattttttctttttctatttaattttcctatagcactctttccatttcttaccccagtttttgaagccctaaatatcggtttgtttccaaaagatgttacccattttttaaaaaattccattgaaaggatgaaagaaagtcgcctcaaagataaacaaaaggtaaaatctggtggtggtgacatgagaatgttcacttttttattatatttttgggctgtttacatacgatttgtgcacttatctgtgttttttaaaggcagctagagaactttagaccaagagggtttttacattttgctgggaataaagaaggtgaagcttggggaagaaagagaatgagtgaaacagcatttggaatttaataataggcatgactttagtatattatggcataaataatgtagagatagaagctttaccgcttctcttcctttcagtaaattgtcaataaatttgactgtataaagttgccaataaatctgactggataaaaatgactgataaaattattttatgggtattacaatttccctagttcttatattagtaaggaatcatttcaagtccaagcctgttatttttacaccttcttcagcaggagtccctaccaggctacctgcagaagtaagtgtatgttaaatttcagtcctgtcatagcctggactgggcaggggtcttctctgggcattgtgggtgcaagctgactgatccaactttgcctttatgagccctggagaccagcccgatgatgatgcctcaaagtcaggaatgcaggactgggtcccctaggtgacactgaacgttgtatagagttctaggagtggggagtatttgaagatgcattcaaatcagctcccctgggattatccagagattaatctatttgtccattggttaagaataaaagcagcagaacaaataggattgaaattcaggacttcttcctgttcaagaaattatgactagagaatgagctgacaactctttggccaggaagttgtgtccaaaggccagagaagctgaggatcagggagagcaaagactaaaaagcagatagacatgacaaaaggatttctctcaaggaaacatcctgctctccaaggttttagatgcatgattttattctaaacattggtgactcaggcaacacccattacacttctgaacttaaagagagcatattctcaggaggggtgcttaggactggactcctgattcacttctgacttcacaagtgactttctgtcattaaaatttctctttttgcttccagcatcgagtagatttctttcaacagatgatcgactcccagaattccaaagaaacaaagtcccataaaggtaacsaagaactgyatctgggggctactgatggggacactcagagagaaggccctgttctgaaaatgtgcagaaagttttccaggaaaatgagaatytcttccacattgcagaaaggcacacatttggatgttataaatgatagctggaggcactttctagaagcacacaggcatagccacattccaggcttgaagggcaaccctgaacaagtgtggcactcccggaggtcrgtcagtgatctgtggatcacccacatcagataaaatgccagttctcagcctcctccagatccacttactcagaacttggaaacgtacatctaacatccaatcaggagacacactgtccaaataagggtgattttaactggaaacacttggtgaaagtgtgttcacaaggttaatctactgacgggttttatttttccctatataatggaaaagtaactgtgagaaaacctttaagactgtgtaatgtccttttcctcttcaatttttcacctactagttttaccacccatggatggttttgactgaaaccatcattactatgatggtcgcaaaataatgaccatgatcratttcaagccatcaaagtttgacaaccatatgacataattgtgaatattaacaattaattctaaagagcaggaagtggaggctgggcatggtggctcacgtctgtaatctcagcactttgggaggccgaggcaggtggatcacctagggtcaggagttcgagaccagcctggccaacatggcgaaaccctgtctctactaaaaatacaaaaactagccgggtgtggtggcrcacacctgtaatcccagctatttgggaggctgaggtgggagaatcacttgaaccagggaggcggaggttgcagtgagccaagatcacactactgcactccagcctgggcaacagagtgagactccatctcaaaaataatactaaataaataaaataagtaaaaataaagagcaggaaatgtttaactcaaacacaccattgtaaatatatctatgtcttcatctacttgtctatctatgtgtcatctatcatctgtccatctgtcccagtgcaactttttgtgaaaagggaaacagtctatcgttttgttgctcaatacagacatcactagatacatggctattgagtactgaacatgtagctgctgccaatgaagaataatttttaagtatatctaattttaattaattaaatttaagtagccacctgtggctagtgcctaccctactgggtagcagatctacactttgagattatgatttcatttcaattccatgtcctggggttcatgccaactgaataaaataattggaaagttgaatttacccacaacatcatcatgaaaattatcaccagtaaatcacaactctgtagacctttctcacactcatcttgtattgttttcagttatgaaatacatggttggagtgggcaccatatttattttagtaccctaggtctctaaagttcttaatccagtcctgatcaaacagaccaatggctgactgtgctaagcttttcttgggagaaatatcaagagggaggcaaacctgtagtcataaatgctgttcggtgagcatgaagtggagcagagagaatgggcatgtactaaggaagatgctattcgggccaggatggaataggcactatgaattccactcactagaccctattgtttttatatttcatgttggccaatgcccatctatacatgcattcttcctgctgtattattattattattattattattattattattattatttgagatggagtctcactctgtcacccaggctggagtgaagtggtctgatcttggctcactgcaacctctgcctcccaggttcaagcaattctcctgcctcagcctcccgagtagctgggactacaggtgcccaccaccacacccagttgtgggtttttttgtaattttagtagagatggggtttcaccatgttggccaggctggtctcaaaatcctgacctcaatgatcctcctgtgtcagcctcccaaagtgctgggattacacgcttgcaccactgtgcccagcctgttttattaaaaccactcattggactacagtcaatcacctcamttctagatttttgtctctgtagctttcgtatatccagaggtcatccattttgaagactagtgccctaggaactctattacttgatgtcactcaaagatgtaatccatgcttctcaagccatgctgggctcacaaattaccacatctcatgaaagttcagattttgattctgcagtttgagggtagggtttgagattctgcatttctgataagctcccagatgctgctggtgctgctggtccatggaccacattttgagtggcaagagcccaatattcttcccttgggttcccgcaaacatgcttagagaaaagttcctttatatttccctaaaatcaagccttagtattgcaaactgtctcattgtttgtcaagctatattgtagctagagtaatttaaatcttccctggggagaatgttactccacgtttacttatagataaagaacttctatgattatccaagggacatccctataacactgagtatgttagacagaaatgctctctttgaaagttacccagctgtgcagctggtggggatggtatgatgaggagtgaatggcccacaatcgtgtagaccctggaaaaaaaactggattaaagtgactttgccttattctggctctgtaggatacacatcagagtgaagccacccgcagtgtgactctgaattgcttttctatttttgctyttagggatttgggagcttcactggaattttgcttcatctaaactgtgatgctctacactaaccacttttcctaaaatatatttcctctcctttcagctctgtctgatctggagcttgtggcccagtcaattatcatcatttttgctgcctatgacacaactagcaccactctccccttcattatgtatgaactggccactcaccctgatgtccagcagaaactgcaggaggagattgacgcagttttasccaataaggtaaggggatgatcccctggagaaggagggagaaggtgaagcctcagcaagaatgccycctcaccacttgccaggacaatttttgcaaaaagcgtaagcatcagttctttcatttacactatgcagaaaggctgtaaagagtaaaaacaaagggagaatcgtaggtagtggatgcttcttgcgtaagtgtaagatctttgtgaaacagtgctggtcctgctgcatccgttgtctgttagcaacataacaccaagtaaaaaatatccagaaatctcaatgacaactaaaaacaatcatttattgctcacaagtctggatagtgagctctgctgatattggctggactcgctgtggtctggcagtggtctgatggaacctggccctgggtgcgctgggcaggctgactcagctctgcctcacacctctctctgctccagtcaagtagctagtggtgaagaagccaagctaggacccagggtgcctgacgcctgggccaaacatttaacctctacaatattaccttccaaatataacaccaaatgctagccacgtattacccacactgtttccagaattctgcccaaattggaattctttatggtgtaacgagatctggccttggggctggccctggtttggcagtgaggtgaacacaaaggaatgttcatctaagttcatagtccaggcctgaaggaacaagtgggaaattgttcgagaaagacaggatggggctgcccggagggttcctatcctgtttacaactctcagtagcactgaaattgtgtgccctgtccagttataaagttcttttgtcatatttgggttacaaaagaactagtttatccccaaactatttatagggtttttatataacatagtgttactctccacattttttttttgcatggagtcttgcttcgtcgcccaggctggactgcagtggggtgatctcggctcactgctacctccgcctccagggttcaagtgattctcgtgcctcagccacctgagtagctgggattacaggcgtgcgctactatgcccggctaatttttatagttttagtagacacagggtttcaccatgttggccaggctggtctcaaactcctgacctcaagtgatccacccaccttggcctcccaaagtgttgggattataggcatgagccaccatgcctggcctaaacaggacttttccattttaaatgcttgtatgaaatagaggatttgctttttacattttctttttccttggtacagatgcatagcctctctttggaaaggtgacactggctttggcatattttaggtgattcaaatggccatcgtctattagtcatgtttgttctcccaagaaagaaaaaacacgaaatggtaatgtcaaggatttcagtctctgtgtaagtgattgtgccaaattcataactcctccacacatctcaatgggccatygagcacatcactgggtatggagaattattaaaataatttataaatgcaacaatcttttaccagaatkaattattctcyggarctcctaacacttcaatagtactgcatggactaagttgaaagttaattcccaatctcaatttatccaaatctgtttctttcttcccaggcacctgtcacctacgatgcyctggtacagatggagtaccttgacatggtggtgaatgaaacgctcagattattcccagttgttagtagagttacgagagtctgcaagaaagatattgaaatcaatggagtgttcattcccaaagggttagcagtgatggttccaatctatgctcttcaccatgacccaaagtactggacagagcctgagaagttctgccctgaaaggtacaaggcccctgggaaaggagccttccctcaaccagcctgattcaagtatattctgcctctctcgatgcacatggcaatcatttgaatatgtgccttttcattttggaagttttttattacaaaatgataactgttaaactttacaaaccatagattaagaaacaccttataacaaccctcattaactatgtaatgcctgtcttgtaggcatttttctatgcatacagacatttttaaaaactagtatactatcacattttatttgagtttgaactgctgcttacttcatttcaaagtaaaccattacctatctactatcttacgttactacatatttctatatgcataagctataattcatttcaccataatgttattttgagtatataagcttgttattcatttcagtttttctttgctgtgccctttagctctctgaatttagcaccacgtttaggacatgtttccacattcctttttctttcaacattgcttgctgttttccgtaatgtaactgtgaaagtgcaggctgagatcctgagacatcctcatccctgatggtttaagccacttcattgaggacagagggaagcagaggttctcctggtcctgtttgtgtctgcagtcctgtgccggctcccttrtactctcagttgttgatgactcttccaaagcaaagtcacctgctttctagacttctcagaagttcttccttggaagtgttgggcatgatattctgggaattcagagccaaggtcaagctttgggcacaatttgcactctggaaatagttgatattttcccattttggaaaggaaaatttggaatgaactttgtagggcactggctggtgaggcctgggatctagacttttattggcccctaactataaacttcccaatggcagggaccttgtcttgttaggcatgctgtctctactgctggcacagactctgtacataatacttgttggaagagcaagtcagaattgaccratttctctgttttctggagtagaggacttctgtgtttcctccatcttggcacttccacctcctgtggctgcaccaacacaaaatcagagaccactcattgtacttctctttgcatcattcagtcaccaaacagatagtaagtggttaccgtgwgtcaggaactgggccaggcagtgagaaatccatatactaaaaaaagtctgttgtgaagaatgtttgacatacacataactatattctatagacaccaggctatagaacagtattaatgcatccccctgtgttcatcacctgtctcagtagtcaatgctgcatgtcagcttccctgtccacacaccaccacaatcctctctgtgactacaatgttatcttgaagaaataacctgtaaatatttcagaattttctctaaaatataagtagtcttttaaaaacacataaccacaagggcattatcactttcctccatcaaaattttttcacaatataatcaaatattgaggaatcaaatttgaataaacatgggtttaaccttcaaaaattgtatagccggccaggtgtggtggctaacacctgtaatcccaacactttgggaggccaaggaggtcctcgcctcccaaaagccaccacaccctgcataacgtgtagttttaatagtttttatgtttcattaactwgtttttatgtactactgtgaaagtaggttcagtaagaagaacaaggacagcatagatctttacagatacataccttttggagctggaccccgaaactgcattggcatgaggtttgctctcacaaacataaaacttgctgtcattagagcactgcagaacttctccttcaaaccttgtaaagagactcaggtcagtaaactttcttataaataatgtttattgggagttttttaaactgagaagtctacattttttaaaaattattgttcatttttcaataatttgctctgtaggacaaagaatctaattggagctatccataatgcttaaagatgaatcacttctggagttcaaaatctgtggctttgtaaagacagaactataaagatcatctaatgtcaatatagattagcatggtataattatgttcagtctctgtgaacttgagcaaattttaaattcagtttcatgtcaactgtaaagatgaggaagtcttttgcacaatcatgaagtgcaatgattactttgtcaggactttcgaatggtgctctcctccactagaactcactagaacttgcagaagctttctcatgacagtgtttctcaaccactagctgtacattggaatcactggggagcttcaaaaattcatgatgcctggatcatctcacaaattctaaactaatttgcccagagttgtggctttaaaagctctcccattggtcctcatgtgaagccaatgttgggaatcactaatttaaggcatttctgccagatagaaaagatacttacagtccaaggccatcctgaccatttgaccttatcttccaggagcactgcttcgctgcttcatacaagctgtgcatcttttcaacccaataatagctctatgaatgttcttcttttccttctcattatgttcctatcccacaagtcctacatcaattccccaagccactctaagaaaccttccccatcgagtacagggccagttattcttctgctttgttactgtttattgcaggctgttatcatcacctaatcttatacttttcattaaaccactcagttttattctacaagtcttttctctattctaagaatttctcctctctgccccatttatgttgttttgttttaattctttcataaaagtccaatagtgtcttgcagaggacattatccattgcaggcattccacacatgtttaaggagtgagtttcagttgatttggagttcttggatacaagttttaagctgtttaatttttaaatttaatatgtgacatttgtatatttgagtgtgtatgtctgtctgcaggaaaaacattcatgccatttgaaattttaaaataatgagtcacattaatagaaagatatggaatctttctctgaagaacttaatgaacacttgtcatttatttatatcaagcaaggccctataagccttatttctaggacttgtgcatttactatgcaactcctattctaaagtaggctttgtgcatgggaaggaagaatagatagggtttcaatcttatttgtggctttagggaagctgtacatccatcctctaagtgtgtacagacaggggctcaactctgaataaaagcaggtctctggcacacatgggatggggtgatactccctggcaatttcccaagcatctactagctggcacttttcaatttccatgacaatttgcctgcccttcacttaactgacatcagaacatttctctgctggctgctcccctgacactgaagtgacttggtgagaatgagggctcaaagtattagtcaaaacactataggccttgagaagcttcccatttgcatttcctttggaaatcaagagaagaagtaaaaaacaaaagcataatgcttcttgaagatctcttcccatcattacactggataggttcagttggatggagttagtgaatgcttaataagttgaagactgtccatataattgaaatatataacacctactgaggattaccttgcaagtttcatcatatacaaaattaactttatatggcttttccaaaatagtttaacataatgcctaataatctggatttgattttttaaaatatctctttgcttaaaatttaaataaaaaggaacagaagccagcatgaacaatctcaagcctggcacagaatagatactcaataaatattttgttaaatgatgaatggtaaatgctttcactatccaatcttcacagagctaactgaacaagtacaaataaaccaacatgtatggtgctgaaagtagtttttttttagtcattgcaaagcattacccttgatgtcatcttttttattttgcttctatcttttcttcatttgcttcattgtttctgaatattcttgtttaacttttgcagatcccactgaaattagacaatctaccaattcttcaaccagaaaaacctattgttctaaaagtgcacttaagagatgggattacaagtggaccctgactttccctaaggacttccactttgttcaagaaagctgtatcccagaacactagacacttcaaattgttttgtgaataaaactcagaaatgaagatgagcttaattaacctagtatactgggtgaataattagaaattctctacattcattgagctctcattgtctgggtagagtattacacgttgcatactacaaagcaggtgacaaatcaatgccaaataagtacagtcatcttctctagttctcataagactatctccccgccacctatagttagtaccctcaagtcctcctgagctgtgatcagagaataaacatttctcaacaattttaccaacaatttttaatgaaaaggaaaattatacttgtgattctcgtagtgacatttatattacatgttccatttgtgatattctataataagtattatattgagaaagtcaacaagcacctctttacaaaactgttatctgatgtcttcctgcatattaaggatgaatctacagaattagatcaataaggatcaacaaataaatatttttggtcattataattgctggttctgtggggtcttttacaggactctaacttgattattaatctaggtgtgagttaaaccactgtgactttgcccattgtttagaaaacatattcgtagtttcattgggcctcttttgaagcacatattttggtaacattcaacttaggaacttatttttacattattagttttgatttaatgttatatctcatctcacctgatagtgctggaaggcagggaacatgttttcctatacttgttctatttcacctttaactcccaaatgttttaacataatgaacaccgaataaaatgtggtttattagtcaactgattcggcagcaaagctaaaggcattcatcagtttcagctggtatcagaggctgcacagagttcttccttttccttttctgcttcatcccaaagaaatggggctatatattcccaaattttcaaaataatgttgatattttgacctcctcccatggctcataaatgctctcaatggcatctagagtagtaaatcctttccagaaggctttcaattgactttgcccagatccatcagaggaattactatctaattcctctgtagccttatgaaatgtatttcttaaataataagacttgaaagttaaaattactcttttatccacagctgcagaatggatgttttgttagtaggcattaaagcaacaataatctttttgtcatcttcattggagctcttgagtgactaaatgtattatcaatgagcagtgacattttgttttgtttgtttctcttttattttattttaggtttcaggatacatgtgcagaacatgcaggtttgttacataggtaaaggggtgccatggtttgctgcacctatcaacctaccacctaggtattaagccccacatgcattagctattggtcctgatgctctgcctcccccacccactcccaacaggccccagtgtgtgttgttccctgtgtccatgtgttctcattgttcagctcccactaatgagtgagaacttgtggtgtttggttttctgttcctgtgttagtttgctgaggaggatggcttccagcttcatccatgtccctgcaaaggacatgatctcattcctttttatggctgcatagtattccattgtgtatatgtaccacattttctttattcagtctatcatcgacgggcatttgggctgattccaaatctttgctattgtgaatagtgctgcaataaactggctaagtctacctgaagtcaattgttgtctaattttatctgtgttgtagacatttttaaaatcatctcaagaagctagaccagcactatttgcttgggagttgtgcttatgtaaagaaatgtgactagtaacagatacaaggtttaaaaagaaaaaaagtgaaattaatagtaatatgataactctagtttgcataatgcttataagccatgaacctaggcttaaaggcaagtaattaaataaaccaaatgaccataaggaattagtcgagacaggttgtaaccatgtggccagtttttcttattttgtgtatatgggtctccacttttccagagtgaggactaagccctgagttttttcatcttgcccaaattcctatccacagggtctagggagtcatgccctacaaaccataaattctcatcagatgggttttatttaaccctatatatcgtgacttactttccaatctgactctggcataacattacgtgacaaagaagaaactcaaaatattttaccccaaaacatgtttctttgccatatcttgaaatggtcctgcaaagctgtcctttgtggggggaaaatttgcatctgtaaagaatctctttttatcatgtagctagatctttttcttccaggccctcccaatcctgaagagatgaagtaagagtctaacaccttttaaaggtctgaatgggaaatatttgtcatctattgtctctaagggcagtcactgtaaaacctcaaaagaaccctggtctccacaacctgtttttttttttaatcttaacctgaacatttcctttctattgatcccaggtctttagacaaactcaaccaactgtcagtcagaaaatatttaaatttacctatagcctggaagcacacacacccccagcatcccactttgagttgtcccacctttctgaaccaaactaatgtatttctgaaatgtatttgattgatgtctcatgcctctctaaaatgtataaaaccaagatgcaccccactaccttgggcgtatgttctcaagacctcctgagggctgtgtcacaggacatgctcactaatatttggctcagaataaatctcttcaaatattttacagagtttgactcttttcatcaacaagaggaaattaccctaatagagcatgtagtattagcaataatgttaccggaaaggggtcccaatccagaccccaaaagagggttcttggatcactcatgagaaagaattcagggcaagtccatagagtaaagtgaaagcaagtttattaagaagtaaaggaataaaaaatggctactccacaagcagaacagcagcataggctcctccttggctatttttatgttatttcttgattatatgctaaacaaggggaattatttgtgagttttccatgaaaggggtgggcaatccccagaactgagggttccttcccttcctagaccatatagggaaactttctgacatggccatgtcaattgtaaactctcatggcactggcgggagtgtcttttagcatgctgatgcattataattagcatatcatgatcagtgaggatgaccagaggtcatcttccatcaccattttggttttggtgggctttggccagcttttttttcacatgctgttttgttttggtttaggtggtttttttggagacagggtctcactccatcaccaagcctagaatgcagtagtgcaatctcagctcattgcaacctctgtctcccagggttcaaggaattctcgtgcctcaccctcactgccacccccaccgccctgagtagctgagactataggcatgcaccaccacacctggctaatttttgtatttttagtagagacggggtttcaccatgttggtcaggctagtctcgaactcctgatctcaggtgatcctcacacctcagcctcccaaattgctgggattacagacatgagccgccgtgcctggcctcacctgctattcttttagagttgtaatgtgttgcttgtcttttcctcttaacaagtattttattgcttttattgagcaaatgaaagcaatgatcaaaacagtgctagtgaaagaatgttattctgtcttcccaaactggagggtagacattcatttttttaatttaaatagttatttaatttttatttggaaatatatattcacaaaagttgccccaaaaatgtacagagatgtgtcatgtactcttcattctgtttcccccaatgttaatgtcttccataactgtgtatatagtatattcctattactctagtaacaagaaattgacattgatataatccacagggctttagtcagatttcaccagttttatgagccctcatttgtgtgtatgtgtgtgtgtgtgtgtgtgtgtagctttatgcaaattcatcgcatgtgtagatttgcataatgcccagaagaatcaagatacagaactgccccatcggcgtgtgacccttctgattctcacctgctattcttttatagtcataatgtgtagcttaacttttctttttcacaagattttttcattgcttttatcaagcaaaactttattttaaggggaccaatttatcaatttttcctgttatgaattgtgttcttggtattgagtctgaaaattctttgtgtatcgcaccccacccccgatgtttttgttgtttttctaaaagttacatagttttatcctttacatttaagtctatgattcattctgcattaatttttgtataaggtatcaggtttagatcaaggttcgtttcttggggcttatggctgttcattgttccaacaccatttctggaaaggctatccttcctccactgaattgcttttgcaccactatcaaaaatcagttgggccgggcgtggtggctcacacttgtaatcctagcactatgggaggttgaggcagatggatcacttgacatcaggagttcgagaccagcctggccaacatggtgaagccccatctctactaaaaatacaaaattagctgggcgtggtggcgcatgcctatagtcccagctactcaggaggctgaggcagaagaatcgcttgaacccagaaggtggaggttgcagtaagccaagctcaagccactgcactccaacctgggcgacagagcaagactctatcttaaaaaaaaaaaaaaatcaggccaggcacggtggctcacgcctataatcccagcattctgggaggctgaggcaagcggatcacgaggtcaggagttggagaccagcatgaccaacatggtgaaatcccgtctctactgaaaaatacgaaaattagccaggcatggtggtgtgcacctgtaatcccagctactcaggaggctgaggcaggagaaatgcttgaaccagggaggcgaaagttgcagtgagccaagatcgcgcattgcactccagcrtgggcgacagagcaagactccgtctcaaaaagaaaaaaaaaaatcagctgggcctatttgtgtgcatctacttctcattctctattgtgatcacagcgtcttgactatagcagctgcacagtaagtcgtaacattattgagagtgatttctcccacttcatttatttttttcagaaatattttatctattgttggtcctttgactttctatacaattcagaataaacatcgatatctaaaaataaacttactgaaattttgatacaaattgaaataaacttacagatcaatatgaaataaatctatatctttactatgtacaatcttgaccttatgaacacaggatacctctccatttcctttccttcctttcttcctctcatgtacattttgtagtttcaggatagtgagatgttttgttaggtttatacctaaagtctttaattggaggggttataaatcatatagcatttataatgtgttttcacatattcattgctgtcatgtagaaatgtgtttgactttttatgtgttgatcttgtatcttacaattgtgctaaattcacctattttttttgtttttgtttttgttttttgagtcttactcttttgcccaggctggagtgcagtggtgcgatcttggctcattgcaacctctgcctcccgggtttcagcaattctcctgcctcagcttcccgagtagctgggactacaggcatgcaccaccacacctggctaatttttgtatttttagcagagacggatttcaccatgttagccaggctggtctcaaactcctggcctcaagtgatccacccacctcagcctcccagagtgctgggattacaggcatgagccactaatctgccccatcggcgtgtgacccttctgattctcacaccgcacccggcctgaattcatttttttattccagagttccccttgcatattctttgagtgttgagatgctcctgatcatactctagtacggagatgtgttcttgagaaacctgagacagaaagtagagaagggcaagcccctcactttgagagtaagtaggagcacagccatggagttctgagctgtaatgagcccctccagctgcctgccatggagctgatatccccactcttgggttagtccagtgaccagacaaaagcagggctgtagcgttgtgactacaatgggccacccaagaggggacggctcccatgagaagacagggaagcagtgtggcatcgggagtcagggggattattttctcctctgttcacagaagcctaaatttattcatctgctaaattgtcaccatggatattctggaagaaaaatacattttctagatg

SEQ ID NO: 94286 - DNA, 28899 bp, Homo sapiens
accatcctggctaacacggtgaaacccgtctctactaaaaatacaaaaaattagccaggcgtggtggcgggcgcctatagtcccaactactcgggaggctgaggcagaagaatggcgtgaaccagggaggcggagcttgcagtgagccgagattgcaccactgcactccagcctgggtgacagagcgagactctgtctcaaaataaataaataaataaaataaaataaaatataaaaaataaaaataatgaggccgggtgcagtagctcccgcctataatcccagcactttgggaggccgaggcgggatgatcacctaagttcaggagttggagaccagcctggtcaacatggtgaaaccccgcctctactaaaaatacaaaaattagcagggcatggtggctgccatctgtaatcccagctactctggaggctgaggtgggagaatcccttgaacccatgaggcggaggctgcagtgagccgagatcgtgcgactgcactccagcctgggtaacagagcaagactctgtctcaaaaaacaataataaaaaaataaaataaaaagaacggatctgaggacaaaggggcagatgacaggatatccacccatttctctgttccacagagatttgccaagtgtgtgctgtgcacctgtgcaccaggcctgtgctcagtgttggggttgcagcctgggatagcatggacagaatggtctgcagcagatagagctgcttctgtacagcagagggatccccaccccagaagagcaggtcctctcagggttgtctccagcctggacggtaccttgtgccaagtagaaaaagtggtccttccaggaggacacagccctgtgggcacacagcttgggaagcagatgaggcaagctgagcactccacagcaaagtatcatttccacaaccatgcctggagactctggtttccctttccctttctctctctctctttctttccttctttttcattctctctctcgctttctttttctctctcttcattctttctttccttctttcttctttccttctctttctttttttttttttttttttttgagacagagtcttcgctctgtcgcccaggctggagtgcagtggcgcgatctcgactcactgcaagctccgcctcccgggttcatgccattctcctgcctcagcctcccgagtagctgggactacaggcgcccgccaccacgcccggctaattttttgtatttttagtagagacagggtttcaccgtgttagccaggatggtctcgatctcctgacctcgtgatccgcccacctcggcctcccaaagtgctgggattacaggcgtaagccactgcacctggcctctgtctctttcttcctctctttcctctatctctctgttacttctttttttttttttttttgacagggtctcactcttttgcccagagtgatcttggctcactgcagcctccctctccagggttcaagcaattctcctgcctcagcctcccgaatagctgggattacaggtgtgggacaccatgcmccgctaacttttgtatttttagtagagatggggtttcaccatgttggccaggctggtcttgaactcctgatctcaagtgatccacccaccttggcctcccaaagtgctgggattacaggcatgagccaccacacccggctgagactctgactcctttctagaaggaatccttaacctgaggaccaccaacccccgcagcaggagtcccccaaagcacatcattcattcattcattcatttatccaacaaatatttattgaacaactttgtgtgtctggcacacctctaggtcctacagagatggcagtgagaaagcacaaaaacttttctgttttcaaatagggcaaaatgccagtaattgttaaacataggcagaggcggtaacaggtgttcattgtagttatttttttttctgtgtttgaaatttttattgaaaatagaagttggaagaaaaaaaaagtttatcttccaagagacagacaataaataaggggtgtatgtgtggtggtgctaagtgctaaagaggacataaaacagaaatgagggggttggcaagtgtatatggaaattccaactttaaatagggtgattccaggaactcctcactgagaaggtgatttttgaataaagccctgaaggagagaagggaatgatccaggctgctttccggaggaacagatgtcctggcagcaggcacaaaagaggcaaaggccccgaggccagaacatgcccagtattttccaggaacagcaatgaagcaagtgtgtggctggagcagagacgggttgccaggagtgggggkgcaaggtgtgagtggaaaggggaggggcgagcagatcaccagggccttgaaggccactggaagggctgtggcttttaccctgagtgaccagggtagcccctggagggtgtgagccgagagtgactgaagccgacttgtggagggtaataagtaggcacccttcaggggccggggggtctctagggctcccattagacgctcagagcagtccaaaccccaacaaggctaaggtccagtgtgacggccaggcacggtggctcacgcctctaatcccagcactttgggaagcgacgtgggcggatcacttgaggttaggagttcaagaccagcctagccaaaccccgtgtctactaaaaatacaaaaaattagctgggcgtggtggcaagcccctataaccacagttacttgggaggctgaagcagggagaatggcttgaatccgggaggcggaggttgcagtgagccgaaaccgcgccactgcactccagcctgggcgacagagtgagactccatctcaaaaaacaaaacaaaacaaaacaaaacaaacaaaacaacagtgtgacgtaagtttgcctatcaaattttgccgctaccgggtctcggcaggaaggggcgggcactgcttggttggtaggctggggcggcgcgttgccatagcgaccccggccgggcccgcggcgcgcgcagctgacggacattgaggctggatgctgcgatcccgcaggtgagcgcaggtgagccgggcgcaggtggggcaggcccaggactcctgactgaccccaagccgtctggttcccggctcctccctcttccactgtgggttttttgttttgtttttttttcccttgagacagggtctcccgcccaggctggaatgcagtggcgccggatgatagctcactgcagtcccgacctcctaggatcaaggcatcttcccacctcagcctcccgcgcagctgggactacaggcctgcgccaccatgcccagctaattttttttttttttgtagagataaggtctcactatggttgcccaggctggtctccaactctcggactcatgtgatcctcccgcatcagcttcccaacgtgctgggattgcaggcggcagcccccatgccgccaggccggtctttgttactcagcatcaaaacaacctgggccgactttcatttcctgtcaacagctcaggtgttaggactacagcctcctccggagtagaacctatgttccctaaactgtgggatggagggtgattttaggttacactgatgaggtgtgaagtaacacccaatgacatcataagaaagttattagagtctgggttctcttgcaattctgagtaagccaagaggagtcagtctggtgattacatggcattaacacctcttttaacatttgctaatctttttttttttttttgagacggagtttcactctttttgcccaggctgagtgcagtggcagatctcagctctcactgcaacatccgctttccggtttcaagcgattctcctgcctcagcctcccgagtagctgggattacaggcgtcgtcaaccacgcccggctaatttttgtagtttgagtagagacgcggtttcactatgttggccaggctggtctcgaactcccgacctcgtgatctgcccacctcggcctcccaaagtgctgggattacaggcgtgtgccaccgctcccggccttgctaattcctatttttaacagagaccttggagctcagtcaactctaagccatagcatctagctaagacttaaattggttctttcagtgttttcatttttacatttattattgccttagggtacctgctactggttttctatttataataatgatacgtaaagtctccattcttctaatttttttttttttttgagatggagtcttgctctgttgcccaggctggagtgcagtggcgcgatctcggctcattgcaagctccgcctcccgggtcatgccattctcctgcctcagcctcccgagtagctgggactacaggcgcccgccaccacgcccggctaatcttttgtatttttagtagagacggggtttcaccatgttagtcaggatggtctcaatctcctgacctcgtgatccacccgcctcggcctcccaaagtgctgggattacaggcgtgagccaccgcgcccagtctttttttttttttgagacagagtctcactctgtctcgcccaggctggagtgcagtggtgcaatctcggctcactgcagccttctcctccctggttcaagcgattctcctgcctcagcctcccgagtagctgggattacaggcgcccgccaccacacccagctaatttttgtatttttagtacagacagggtttcgccatgttggccaggctggtgttgaactcctgacctcgggtgatccatccgcctcggcctcccaaagtgctggggattacaggcgtgagccactgagcccggcctattttattattattttttaagactgagtctcgctctgtctcccaacctgtagtgcaatggtgcaatctcggctcactgcaacctccgcctcctggattcaagctgttctcatgcctcagcctcctgagtagctgggattacaggcgcgtaccaccaggcctggctaatttttgtatttttagtagagacaagggttcaccatgttgactaggctggtctcgaactcctgacctcaggtgatccacccgcctcggcctcccaaagtgctgggattacaggcatgagccactgcgcctggccctccttttttcaatatatgtattgatttttttaaagtgagttaacttatttttattttcttcttgagaaaagttctcactctgtcatccaagctggcgtgcagcggcatgatctcggcttactgcaacctctgccaagtgagttaatttacatataaagattaatagtacatgtgatatttggaaatgggagaagaaaaaatcccaacggcatagaatttaggacctgagattgtttccccactcccagcttttgctctgcctattttctttgcctggaattatttttccctactcctaggtgtgattgtcaaaatatgtaacccatattttgggttcatattttggattcatatttggctcagtggctcatgcctgtaatcccagcacttggagaggctgaggtggatggatcatttgagatcaggaaattgagaccaacctgcccagcatggtgaaacccccgtctctactaaaaatacaaaaattagccaggcgtggtggtgggcgcctgtaataccagctacttaggaggctgaggcacgagaatcacttgaacccaggaggcagaggttgtagtaagccgagatggtgccactgcactccagcctgggcaacaaagcaagattccatctctaaataaataaataaatacataaataaataaaaatatttagaagacataaaaaaaaaaatatatatatatatatatatatgtatatatgaccgccaccccctccctgggggcagcttctccctgatgccatcacaaaccctcctgctctactggtttccctagattcccaagtaattgtgccatcagaccccctgggagggggccccaggagaggcaagggaggggccaaccaaaggtcagtccagcactaaaggatccccactaagggctgttcacctgccccagggactcagaacacacatgactctccccacttgagctcaggatcccggcattacacggggcgcrctgagccccagatgtccctaacccctttccagcaccctccagccttgcagaagcagccaccatgccagtctctaagtgcccaaaaaagtcggagtccctgtggaaggggtgggacyggaaggcccagaggaayggcctgcggagccaggtataygctgtgaatggcgactactatgtgggcgagtggaaggacaaygtgaaacacggtgagtgggactccgggacgggcggccggagtggggtcagagccacagtgggcaacagggccaggaaggcagagtgcagagctcactggggacatgagatgtgtccccaaggctcccccagggtgagcgctggcccaggccagctgggggccttcacatgctggggcttctgaacaaactcagccctgacttcaactgagtgagggtctcaggaccagcagtggacagagggtcttgagaaactggcctgcccccggggctctgggacctagggggctcagttcctgccttctgagacctgggttaagcactgggctggctggcaacaagaaaagccacgcccctgaagccagcttgcagtggggttctgggcttcgcattcagctgtgatgctctgcagagggctgagcgccaggcacaagggaggaccccctactccatcccacaaggaggagctggggctccaagtctgaccagcagggggcaaaggggtcctgttgatacaaactaaatcctgactggggaaaaaaataaagaaaaaagagcttttattttaaaatgtggcactgctgctcactccagtcttgcaattccagactctgtactctttttttttgaggggacaaggtcttgctctgtctcaaaaaaacaggctggagtgcagtggtgccttcatagctcactgcagcctcgagatcctgggctcaagcaatcctcctgtccaagcctcctgaattgctgggattacaagtgggagtcactgtgcctggctagattctgtgctctttttatttttttagacggagtttcactcttgttgcccacgctggagtgcaatggcacgatcttggctcaccgcaacctctacctcccgagttcaggcgattctcctgcctcagcctccagagtagctgggattacaggcatgtgccaccacgcctggctacttttgtatttttagtaagacggggtttctccgtgttggtcaggctggtcttgaactcccgacctcgagtgatccgcccgcctcggcctcccaaagtgctgggattacaggcgtttagccactgcgcccagcccaattctgtgctcttaaccatcctgctctcctgccttgctgggttaagtgctttgcagtcaaataaacctgggttaggatcccagttccaggctgggtgtggtggctcacatctgtaatcccagcactttgggaggccgaggcaggcagatcacctgaggtcaggagttcaagaccaccttggccaatatggtgaaatcccatctctactaaaaaaatacaaaaatgggccaggtggggctgggcgtggtggatcacrcctgtaatcccagcactttgggaagccgaggcgggcggatcatgaggtcaggagattgagaccatcctggctaacacagtgaaaccctgtctctactaaaaatacaaaaaattagctggctgtggtagtgggcgcctgtagtcccagctactcgggaggctgaggcaggagaatggcgtgaacccaggaggcggagcttgcagtgaaccgagatctcgccactgcactccagcctgggcgacagagcaagactccgtctccaaaaaaaaaagaaaaaaaaaaagacttggaggagagggagtaactgagtggatgtttgcaggaactagcatagaaggtggcaggaccagctggagcagagaatatacctggggtgttcaaggaacagccaggaggacggtgtgggtgaaacagagtgaggaagaggaggaggtcagagaggttgcaggccggggacrgtggctcacacctgtaatcccagcactttgagaggccgaggcaggcagatcacttgaggtcaggagttcaacaccaggctggccaacatggcaaaaccccatctctactaaaaatacaaaaaattagctggatcgagtggtgaacgcctgtaatcccagccactagggaggctgaggcaggagaattgcttgaacccaggaggtggaggttacagtgagccaatatcatgccactgcactccagcctgggtgccagagcaagactctgcctcaagataaacagtcctggcgcggtcgcttatgcctgaaatcccagcactttgggaggccgagacaggcatatcgcctgaggtcaggagttcgagaccagcctagccaacatggtgaaactccgtctctactaaaaatacaaaaattagaccagacatgatggcaggcacctgtaatcccagctacttgggaggctgagataagagaattgcttgaacctgggaggaggaggttacagtgagctgagattgcgccattgcactccagccagggagtttccaagaackaatctccatctcaaaaaaaaaaaaaaaaaaaaaagaggttgtgggttaaagaagaagggtagtcagatcatataggaccctgtcagccatggtaagaactttggatttgactctgtgacacagggagggtttagagcataggaatgacatgatctgattcatgtcccataacacccatgctggctatttagttgtgaatgaggtgggggcaggaagacccctcagaggcccttgcagacatccaggtgagagacatccagcaggagaacgaagcaccccataaaagcaaattattagaaaggcaggaatggagccatcctcagggaaggcttaggacaacttctccatctatctgcttctccctggctggccttttttctctcctcctgcaagtatacctctgcatgatacacatggctgccagcatcttagtgacaggatggaggaatcctcttcacttcctgatatagttttgtcttgtttgagacagagttgtgctctgtcgcccaggatggagtgcagtgctgcgatctcggctcactgaaacctccacttcccaggttcaagtgattcttgtacctcagcctcccaagtagctgggactaaaggcacacaccaccacgcccagccaatttttgtattttctggtagagatggggattcacttgccaggtgcggtagctcacgcctgtaatcccagctctcagggaggcagaggtgggagatagcttgagcccaggagttcraggcctgcttgggcaatatagcgagaccccgttctccacaaaaaggaagaaaaaaaaagacaaataaataaataagtgagacacggattcaccatgttggccaggctggtttcgaattcctgacctcaagtgatctgcccaccttggcctcccaaagttctgggattacaagtgtgagccatcatgcccagccttttccccttattttcctacttgataagttttggtttgcctcactgtgtcctgtgcagactctcagctcttccatcccctgtattaaattttctctatttgaaataactagcatttcaaactgtcctagggtcttcagtgttccgacaaccagcatcactgcactgcagaagacagtgcagtatggtttctgttgggtcgtctggaccccgaaccctcaactgattcagtcacccaaacagtagcagaaaatgccaggtctttttttttttttttttttttttgagacagagtctcattctgtcgcccaggctggagtgcaatggtgtgatctcggctcactgcaacttctgcctcccaggttcaagcgattatcctgcctcagcctcctgagtagctgggattacagatgcacgccaccaagcccagctaatttttgtattttcagtagagacgaggtttcaccatgttggttagctggcctcgaactcctgacctcgtgatycgcccgcctcagcctgccaaagtgccgggattacaggcgtgagccaccgcgcccggccaagacctcgcgttttctaatccaaaaaattagccgggcgtggtggcgggcgcctgtagtcccagctactgaggaggctgaggcaggagaatggcgtgaacctgggaggcggagcttgcagtgagccgagatcgcgccagtgcamtccagcctgggcgacagagcgagacaccgtctcaaaaaaaaaaaaaaaaaaaaaaaaaaaaggaaagaaaaagaaaacgcgagatcttaaaaccaggtctcaggactcctatacgaggtactccagtactgttaggctagggactttccccagcacaggccatatactgtgcgtatcaacccctaactcgactgttggatgcctcctgctctcactcttcaccttcttctaataacaggcccctgctaccttggtcacagaaatgagcacgtaatccaactgggcaaatcaaaaaattgagatgagatttttcaaaatggactagcagagaaaaagcacctttcccctctaattcccagcctattgattcccatgtgtctcctgcatttgcctgcggtaggagagactgaagccacccacggaaggcatagtcatgagcatccatcagtgtctttttttttttttttttggtaggggctacaaaaaaaaaaaaaaaaacaggttgttttcgcctgtcctgcccctcacttcctcccggttttatttcctttagggacacccctctcccactctaaatccccaaggttcgggtgggctgactccgcccccctagcaggcctagccaatcaatgtattggctagccaatcactctgttgctcctgggttcaagcgattctcctgcctcccaagtagctgtgattacaggcacctgctaccatgcccggttaatttttgtatcttcagtagagacgagatttcgccatgttggccaggctggtctcgaactcccgacctcaagtgatccgcccgccttggcctcccaaagtgctgcgattacaggcgtgagccacctcgcccggctgcaaccatcattttcaaacctctttgcctttactcatgcagttccctgtgcctggactgcccttcctggccccaacgtcaccccctccaggaagtctctgagtccccagatttgaccaagtgcccttcttctgatattgaaatctcagtgcctaccttcgtatattgaaattgaactatgtgggtattcatcaggcctctttcatttgcaagaggcagaaattcaactcaggagggcttcagtaatgcaagttcagccatggtgggattcaggggcttaatgtcactggaacttggcgtctccctccatgtctccattttgctttcctctgcgttgagttccttcttaagtcagcttcctccccttgcaggcccgggtgggtgtggtggcccaaatggacttacacggagtctcattggaccaacttgggtcaggtggcctgcactgacccaatcacagcagcctggtgggtagaatacactgattgggtaggcctgccagggggcggagtcagccacccaaaccttgggggtttagagtgggagagtggtgtccccaaaggaaataaaaccaggaggaagtgaggggcaggacaaacgcaaacaacccaacagcccctacaatgtggttgggccctaccagaccatgggctccccaagggcaaaaataataacaaaggctcccatgatttgagagaggaaaaaaaaaataaaaaaataaaaaaaaccaataaaggctaacattgacatcgtatttcctacttgyaggctctaagtgctgtacacatatcctggaatctagtgataagaaacaaccccatgagatactgtttttcttttcagaaaattagaatggtcccgtaattgctcacaaattgaatcttttctccctcggctttattgcggtatgattgacaaagaaaaattgtatatacttaagatgtgtagtaagatattttcttaaaagtctacatttcgaaggccggacgcagtggcttacgcctgtaatcccagcactttgggaggctgagatgggtggatctcctgaggtcgtgagttggagaccagcctggccaacatggggaaacaccgtctctactaaaaatacaaaattagccaaacgtggtggcgcatgcctgtaatcccagctactcaggaggctgagacaggagaatcgcttgaacccaggaggcggaggttgcagtgagccgagattgcaccgttgcactccagcctgagcaacaagaatgaaactctgtctcaaaaaaaaaaaaaaaagtctacatttcgaaattattagtacaatcaaagtaattagcatatccatctcctcacattattaccattttgtttgtgtgtggggagaacaattaagatctattctcttagcaaatttcaagtacagtatccaatacaccaatacagtattaatatagaacgatgctgtacaccaggtctccagatctttgtttttgttttgttttgtctttttgagacggagtcccgctctgttgccaggctggagggcggtggtgcgatcttggatcactgcaacctctgccacccgggttcaaatgattctcttgcctccaacctcccaagtagctgggactttcactatgttggccaggctgttcttgaactcctgacctcaggtgatctgcccgcttcagccttctaaagtactgagattacaggtgtgagccatcatgcccggcgttttttttttttttcagtctcactcttgcccagcctgaagtgcagtgttgcgatctcggctcactacaacctccgcctcctggttcaagagattctccagccttagcctccccagtagctagaattacaggtgctcaccaccatgcccagctaatttttgtatttttagtagagacggggtttcaccatgttggccaggatggtctcgatctcctgacctcatcatccgcctgcctcggcctcccaaagtgctgggattacagacacgagccaccgcacccgacctgtttgttttgagacagtctcgctctgtcgtccaggctggagtgcagtggcgcaatctcactcactgcaacctctgcctctgacgttcaagcaattctcctacctcaacctactgagtagctgggattataggcatgcgccaccacaccaggctaatttgtgtatatttagtagagacagggcttaaccatgttgcccaggctagtcttgaacttctagcctcaagtgatttacctgcctcagcctcccaaattgctgggattataggagtgagccactgtgcccagccttaggtctccaaatcttgtacatcttgtaacaaaaagtatgcaccctttgacagaacatctccacattttccccaccccaccagcccctgctaattgctattttactgtttctatgagtttgactttttagattccacatataagtaaaatcatgcagtatttgtctttctctgcttggcttatttcacttggcataatgtcctccagattcatccatgttgtcacaaatggcacgttttctttctttcttcccttccttccttcctcccttcctcccttcctccctccctctctccttctctttctttctttcacagtctcactctgtcgcccaagctggagtgcagtggcgccatctcagctcactgcaacctccacctcccagattcaagtgattctcctacctcagcctccagagtagctgggattacaggcaagcaccaccacgcccagctaatttttgtatttttagtagagaccaggtttcactatgttggccaggctggtctcaaactcctgacctcaagtgatcagcgcgcctcggcctcccaaactgctgggttacaggcgtgagccactgcgcccagccccsccataagatattcttatacccattttacagctgagatatctgaggctcagagagacccaaagaattaacttacttggtcaaggtcacaaagctcagagggataatgttgaatttgttcctgggttaccaaggacccagacatgaattgaccaatattggtactccacaaatattttattcatcgttttgttaaatatgtattaagctcggtgtactggtgtgtgcttgtattcccagctcgtcgagaggctgagaagggagaatctctttagctcaagagttcaagaccagcctgggtaacatagcaagaccccatctctaaaaagaaagaaatgcctggtgtggtgcctcatgcctgtaatcccaatactttgggaagcctaggcaggaggactgcttgagcccagtagtttgagaccagcctgggcaacatagagagactctgcctctataaaatttttttaaaaaattagccaggtgtagtggcatgcacctgtggtctcagctactcaggaggctgaggcagaaggatcatttgagcctgggtggttgaggctgcagcgagctgtgtacgtcagcatagccaacacagccagatcctgtctaaaaaaaagaaagaaaaaggccaggcgcggtggctcacgcctgtaatcctagcactttgggaagccgaggcggacagatcacctaaggtcgggagttcgagaccagcctgaccaacatggagagacccccgtctctactgaaaatacaaaattagccaggcgtgctggtgcattcctgtaatcccagctacttggggggatgaggtggaagaattgcttgtacctgagaggtggaagttgcagtgagccgagatcgtgccattgcactccagcccaggcaacgatagcaaaactccgtcttaaaaaaaaaaaaaaagaaagaaagaaagaaaaaaaaaggccgggtgcggtggctcatgcctgcaatcccagtattatgggtggccaaggcagacggatcacgatgtcaggagttagagaccagcctggccaatatggtaaaaccccgtctctactaaaaatacaaaaattagctgggcatggtggcgggcacctgtaattctagctactggggtggctaaggcaggagaatctcttgaaccaggaggcggaggttgcagtgagccgagatcgcaacactgcacttcagcctgggcaacacagcaagactctgtctcaaaaaaaaaaaaaagaaagaaagaaagaaaaaaaaagagaaaacagtaaattagcaggtattagtcacctacaacatgccaggaacagtttgtttgtttgtttgtttgattttgagatggagtttckctcgtctcccaggctggagtgcaatgacgtcatctcggctcactgcaacgacgtcatctcggctcactgcaacccacgcctcccaggttcaagagattctcatgcctcagcttcctgagtagctgggattacaggcgcctgccaccacgcctggctaatttttgtatttttagtagacacagggtttcgccattttggtcaggctggtctcgaactcctgacctcaggtgatccacccgcctcagcctcccaaagtgctgggattacaggctcgagccactgcacccagcctccaggcacagtttttcagtgcagggaacaaaacagaccaaagtctgtgccctcctgcagctcacattctcctggaaaagacaggcatgcgacactaatcaacaaataagagaattacctctggccggacgcagtggctcacgcctgtaatcccagcactttgggagaccgaggtgggcatatcacttgaggtcaggagtttcagacctgcctggccaacatggaaccccatctttactaaaacacaaaattagctaagtgtgttggcgcacacctgtagtcctagctactctggaggctgaggcaggagtatctcctgaacccgggaggcagaggttgcagtgagctgagatcgcgccactgcactccagcctgggcgacagagtgagacactgcctcaaaaaaaaaaaagaaagaaagaaagaaagaaagaaatggaactttcctggccttctcctgggtacttggtgtctaggatgatgcgcagagcctgtcccagctctctagattcgtctagttggrggcccctgaggctcaggcaggcacaccaccsccaccccccggcggccatgtctgcagcattgcccatctgtgtgtcaccagggaaaggaacacaggtctggaagaagaaaggagccatctatgagggggactggaagtttgggaagcgagacggctacggcaccctcagccttcctgaccaacagacaggaaagtgcaggagagtctactcaggctggtggaaaggtgataagaaatcggtgagcaggcctgccagccggggtgtgtgtgtgtgtgtgtgtgtgygtgtgcgcgcgtgtgtgtttaggggaagccgagagaggcctgggagaaaagagaggggaggtctacagggaggaggacagggttgtgctgctcgtgggagaaggaaggggtgggggaattgcaaagtttctcagaacaaaacccaggaaacaggaagcaacagaaggccagggaggagcccacgaaaccctgcggttgcgaggagccagccaggcttgtggggacgaagtcgcctccacccttttccccctcgtttcctggctttcttttccccaggtatcactttctgagaatcccctttctgctgggcctgaataaaagggaggtaggaaaagtgggagcaagagagcaggggacaggagaggagggtcccggggggccgaagccagccagaggcgcgtgctcagcccggaaacacccaagctgggcacaggttccctccatctactcccacaagtgtggaggaatcctcaccatcagtcccagagacactaataataaacagtattgcaactgagcaactgctactgtgagcctgaaacacatatttaaaacttttttttttttttttttttttgagagggagtctcatcctgccgcccaggctggagtgcagtggcgccatcttggctcactgcgagctccgcctcccgggttcacgccattctcctgcctcagcttcccaggttgctgggactacaggcgcccgccaccacgcccggctaattttttgtattttcagtaaagacggggtttcaccgtgttagccaggatggtctccatcccctgacctcgtgatccgcccgcctcggccttccaaagtgctgggattacaggcgtgagccaccgcgcccggcctgaaacacatttaatattcagttaactctcacagcaacagctcatcatcatcatcatcttcatgcccattttattgataagcaaacaagctcgaagagatgaggtgtcttgtaactgcccaaggggttcaccttgccggtgcctggccttgagttgtattattactcaaatcagtctccccgaacattccagcagcagagtttttaaggataacttggtgggtgggggaaagacagtgaaccaggagtgctgattggtcagagataaaatcatagggagtcaaagctgtcttcttgctccccagacagagccgattcatcaagacgggaattgcaatagagaaagagtaattaacacagaactggctgtgtgggagacctgagttttattattattattattaatttatttattttttgagatggagtttcgctcttgtcgccacgctggagtgcaatggtgtgatctcggctcaccgcaacctccgcctcctgggttcaagcgattctcctgcctcagtctcccgagtagctgggattacaggcatgtggtaccacacactgctaattttgtatttttagtagagacagagtttctccatattggccaggctggtctcgaactcccgacctcaggtgatccgccagcctgggcctcccaaagtgctaagattacgggcatgagccaccgcgcctggccctgggttgtattattactcaaatcagtctcccggaacattctggctgcagagtttttaaggataacttggtgggtgggggaaagagtaagccaggcgtgctgattggtcagagataaaatcacagggagtcaaagctgtcttcttgccctgagtcagttcctaggtggggagccacaagatcacataaatcagtttattgatttgggtagtgccagctgatccatcaagtgcaaggtctgcaaaatatcttaagcaytgatcttaggagcagtttagtgaggatcagaatcttgtagcttccagctgcatgactcctaaaccataatttataatcttgtagctaatgttaatcctacaaaggcaatctagtccccaggcaagaaggaggtcttcgggaaagggctgttactgtctttgtttaaactataaactataagtttctcccaaagttagttcagcttaagcccaggaatggacatggacagcttagaggttagaagcaagatggagtcagttaaattaaatctctttcactgtctcagtcataattttgcaaaggcagtttcagtcttgcctggagtcacacagctagcaagtggtagagcccagggtttcatgttctctgctcccaaattgtttattggcaagtaggaagagaaagccctgaataaccaatttacgtagaatatggtattaggagggatgttttcacagggtgcccagaggaaggtcatcaagcccagcctagagaattcaggacagaaggctaagcacaatggctcacgcctgtaatcccagcaatttgggaggcagacaggggtgtatcacttgaggtcaggagttcgagactagcctggccaacatggtgaaacccccgtctctactaaataaaaaacacaaaaaaaattagccgggcatagtggtgtgtacctgtagtcccagctagggagacggagacattagaatcgcttgaagccaggaggcagaggtggcagtgaaccgagatcacgccactgcacttcagcctgggcaacagagtgagactccatctcaaaataaataaataaataaataaaactatataataataataattagctagatgttgtggtgcacatctgtagtcccaacttttcaaaaggctgaggcaggaggattgcttgatctcaggaggctgaggttatagtgagctatggtggtgccactacactcyagcctggacaacagagcaagacttgtctcaaaaagagggaattcagggcaggcttcctgtaggaggtgacactaaaagatgctaggagttagccaggaagaaaaaaaagggagaaagatgggaggcaaaaaaatagcaaagggaacgagatgtaaaacagcagagtgtgtctgccctgggacaggagtgaggagaagagttgcgggggccctcagggatatgtgggaaatcaggattttgaggagtagacttggcttctcaacccaacctcctcgggtgtgatctgcaaacagaccttgtttccctgtggttggacactaagtgtggtgttttttgttttttgagacggagtctttctctgttgcccaggctggagtacagtggcgcgatcttggctcactgcaagctccgcctcctggttcacggccttctcctgcctcagcctcccgagtagctgggactacgggcacccaccaccacacccagctaatttttttgtatttttagtagagacgggttttcaccatgttagccaggatggtctcgatctcctgaccttgtgatccgcctgccttggcctcccaaagtgctgggattacaagcgtgagccacagcgcccagcctaagtgtggtgttttttgtttgtttgtttgtttgttttttgagacagtcttgctctgttgcccaggtgggagtgcaatggcacgatctgggctcactgcaacctccgactcctgggttcaagcaattcttctgcctcagcctcccaagtagctagtattacaggtgcccaccaccacactcagctaattttttatatttttaatagagacagggttttgccacgttggtcaggctggtctaaaactcctgacctcaggtgatccatctgcctcggcctcccaaagtgctgggattataggcgtaagccaccacgccaggctaagtatggtgtttatgttcatttttctgggtcaaaataagagtgggaggggggcgagcatgatcagatgggcgattttttttttttttgagatagcgtctcaccctgtcacctaggctaccgtgcattctcagctcactgcaacctccatctcccaggttcaagtgattctcctgcctcagcctccccagtaactgggatcacaggcgccgccatcacgcccagctaattttttgtatttttggtagagatggggtttcaccatgttggccaggctggtctcaaactcctgacctcaagtgatccacccacctcagcctcctaaagtgagccggtgagccacagcgcccagcctagatgggcgatttaaagagtcctccggcgctgtaggggctgcatggcgcatggtgtggtggggatgagagaggagagggtgggtcagtaaggagggagtttaatgactggctgcatggaggcgccagcagagggacagagagaaacagagcatggggagatccttcaagacattatcggtgggcactatggctcacacctgtaatcccagcactttgggaggctgaggcgggcggatcacttgaagtcaggagttcaagaccagcctggccaacatggtgaaaccctgtctctcctaaaaatacaaaaattagcagggcgtggtgatgcgtgtttgtaatcccagcttctcgggaggctgaggcaggagaatcacttgaacccgggggacggaggttacagtgagccgagatcacatcactgcactccagcctgggtgacagagtggatctctgtctaaaaacaaacaaacaaacaaaaaagacaggatactccgctaagacacgaccctccgcttggacgtagggctgaggaagaaggaagaagctggggtgtgtggctctaggggtgcctgggaagacggtgggctttcctggtggtgttggggggcgccctgagtagtagcatcttcgtactttcagggttatgggatccagtttttcggacccaaggagtattatgagggtgactggtgtggcagccagcgcagcgggtggggccgcatgtattacagcaacggcgacatctacgagggacagtgggagaacgacaagcccaacggggagggcatgctgcgcctgagtgagtgccccacccccgccggccccgcccacccgaccacgcccccggcagcgagctggccacgcccatttggtcccacagagacaggccacaccccacactcttgtcccacactgrcccttgtgtcaatgtgggacaagagaggaagagcaccctatctctcccctcagtcacaaaaggtcacatatatatgatgctatttatatgaaatttttaggacacgcacctccacagagacagaaagtagactaatggttgcctaggactatgggggtggtgacattagtgggtgtggggaatggctgcttaatgggcacagggtttccttttcgggtgattaaaacgttttgaaactagatagaggtaatggttgcacagcattgtgaatgtactaaatgccactgaactatacacttcaaaatggccaacttatgttatatgaacttatatctcaatttttaaaaaaaaagccaggcgcagtggctcatgcctgtaatcccagcactttgggaggcagaggcgggcggatcatgaggtcaggagtttgagatcagcctggccaacgtggagaaacccygtctctactaaaaatacaaaaagtagctgcatgtggtggtatacacctgtaatcccagctactcaggaggctgaggcaggagaatcacttgaactcgggaggcggaggttgtcactcaggctggagtgctgtggggcaatctcagctcactgcagcctcaacttcttgagctcaagccatcctcccacctcagcctccagagtagctgggactataggtgcacaccactatgcccagctaattaaaaaaawttttttttttgcagagatgtggtctcactatgttgctcaggctggtcttgatctcctgggcttatgagcctcccatcttggcctcccaatgtgttaggatttgcactgagctctggaagagcgacccctgggggtctagcttagtttggtgtaccctgcaccacacctccctgtcctttcycccagagaacgggaaccgctacgagggctgctgggagagaggcatgaagaacggggcggggcgtttcttccatctggaccacggccagctgtttgaaggcttctgggtggacaatatggccaaatgcgggacgatgatcgactttggccgtgacgaggcccctgagcccactcagttccccattcctgaggtgggcagccctcaccagggccctgtggccacacccagacagagacagaagccagcatccccagccatgcccaggccagatctgccaggcccagccaagcccagacagggaacagacaaggttttgttttcagtcagggcatccctagcaagggaggtggctcctgatgaggctggcagcaccccacacggcaggcagcgcyagtcaaggctggcagcctgggtcctccatgctctccaaaccaacttcttggtatttccctccaggtcaaaatcctagaccctgatggtgtgctggcggaggccttggccatgttcaggaagacagaggaaggagattgatgccaggtgaggggtgggcacacctgccaagttctgatgtggctgaggctgctccagggcccagaacaatgcacagatctcctggggtctccaaagggcttggggtcggggagtgggggagcaagaccatcgagggcaggcttcttgcctcctacagtcccaggtgtcctttttgacgcttcctcttcaaaaccccttttgaccggctgtggtggctcttgcctttaatcccagcactttgggaggccaaggcaggcggataagttgaggtcaggaatttgagaccagcctggccaacatggtgaaaccccatctctactaaaaatataaaagttagccaggtgtggtggcaggcacctgtagtcccagctactcgagaggctgaggcaggggaatcacttgaacccgggaggtgaaggttgcagtgagctgagattgcaccactgcactccagcctgggcgacagaatgggactctgtctcaaaaaaaacaaaactcgccaggcacagtaatcctataatcctgtaatcccagcactttgggaggccgaggtgggtggatcacgaggtcaggagttcaagactagcttggccaagatggtgaaaccccatctgtactaaaaacacaaaaattagctgggcgtgggggagggcacctgtaattccagctactcaggaggctgaggcagagaattgcttgaacctgggaggcagaggttgcagtgagctgagactgtgccactgcactccagtctgggtgagactgtgtctcaaaaaacaaacaaacaaacaaataaacaaacaaacaaaccatttcactgaagaccagtgcattccagtcctgcctgaaaccttctatttgcaccctgggccacacaactgagctgggcacggggttgaaaggaggtggtctcctggcttctgaacacccttgagtaaggcagttggccttcagcctccatttacacatctgtccagtggggtcttgtccagtccaagtcctcctgggcatgatgtgagggtttgaggagaggacattggtaacagcgtctttcaaatgccagctccaccatccctctctcccctgcagagaacacaaacgcttcaggagaaattcaagcctgtgtcacccgatcrctcagaccagtgcggctctggctggaggagtcagcagcagctccaggcatgaccccggcaccctcatagggcccctcactacccccagcactgggtcatttcttgccaataggaaggctggtgcttctctcccaggctgtcctcgggaccctcttcattctctgatctcatcctggaatgcatgagaataaagaataaccaagtggtataagcctgggcctatgggataaggatggggcactcgagggggctcagcagggctttcaggtttagaagagggaagacctgccttggctgggctgcctgggtttagcttgggggagtaagggcaggtcttaggccgggtgcagtggctcattcctgtaatcccagaacttgggaggccaaggtaagaggactgcctgaggccaggagttcgagaccagcttaggcaacatagcaagaccctgactctacaaaaaaaaattttaaaatataaaagaaaggaaaagaaaaagagaaagaaatggcaggtcccctgtgagataacccagatgacccagagagaaggcctgtatcctgccacactggctgccaagattggagatcataaaatttcctgaccacttctcagcctaacacagggctctcaaccttgaaatcccatggaaactttgcaaagctgtggaagcccaggtcccatgcccagagattcacaggttcacatctaattcatctggggtgaggcctgagctttcagaaaattccccaggtgattttttttttttaagacgtagtctccctctattgcccaggctggaatgcagtggcgcgatctcagctcactgcaacctctgcctcccatgttcaagcgattctcctacctcagcctcctgagtagctgggattacaggcgcatgccactgagcccagctaatttttgtatttttagtagagatggggtatcaccatgttggtcaggctggtcttgaactcctgacctcgtgatctgccccgctcagtctcctaaagtgctgggattacaggtgtgagccatcgagcctggccttttttttttttttttttttttttttgagacagagtcttgctctgtcacccaggctggagtgcagtggcacaatctcggctcactgcaacctcgcctccctggttcaagcgattatcctgcctcagcctcccaagtagctgggattacaggcacctgccaccaaggctaattttttgtatttttagtagagacagggtttcaccatgttggccaggacggtctcgatctcctgacctcgtgatctgcccgccttggactcccaaagtgctgggattacaggtgtgagccactgctcccagccaagatcagatgttcttgcataatgggcaggtgagctctggagtcacagtgcctgggcgtgaatctcggagctgtgtgttctcaggaatgtcacccaaactctgttctgttggtctcctcacttgcaatatggggcattaacagtacttaccacctggggttactgtggttagttactgtgaggatgagataaggcggtggttttaaactgtgggtaggattttgtcctccctcagccccactctttcttggggacatttggcaatgtatgacatttttgatgtcacaacaggcaggaagaaggctactggcattgagtgagtagagaccagggatgcggttaagcatagtgcaatatcaccatgctacaaaaaaaaaaaaaaaaaagaattcagcacctgtaatcccaactacttgggaggctgaggcaggagaattgcttgaacctgggtggcagaggttgcagtgagccgagattgcgccattgcactccagcctgggcgacagagcgagacaccatctccaaaaaaaaaaaaaaaaaaaatgttgagaaaccctgaaataccacgattctagctaagacctcagcaagaggcacatagcacatagtaaagcctcaataaacaccactgaccttactgaggttctctctgccccctaagtcataagtagggtggcctcaccaagggtgtggttctcagtctgtacctctggcactgggaagccccgcctggccaccctaggatgcagaattaatcataacttccagatatggagcactcactctattccaggccgtgtgctgacagcttcgcagcaagcattctctcctggcactccccgacaacagtgaggtgtcttgctattactgccattttagaggaggaaacaggttcagggaggatcacaagtcatcaagctagtactgtgcttaaacttaggtctagctgttcttaatgtgcagaagagtgtaaagggttaccatttttaaagaaaaagtgggggcagggcatggtggctcatgcctgtaatcctagcactttgagaggccgaggcaggcggatcaagaggtcaggagttcgagaccagcctgaccaacatggtgaaaccctgtctctactaaaaatacaaaaattagctgggtgtggtggagtgcatctataatcccagctactcaggaggctgaggcaggagaatcacttgaacccaggaggcggaggtagtggtgagccaagatcacgccgagccgagatcgtgccgctgctctccagcctgggcaacagagcgagactccatctcaaaaaaaaaaaaaatgttggaagagggtgtgcttgtttatgtacaaaatgtcgctagatttaaacacaataaactggcaaagatggttgtctctggggagaattggggacttgggaacaggagctgaagaacaacttttcagtgttgtgtttggaaccatgtgaatgtattatgtattcaaaatgtaaataaaaatgaagttaaagagactgtgctcctaactaggagtgtttgtctaagttgcctgggtgtgagagcacctggggtgcttgttagaaatagattccaaagacacacccagacctacttaaatcagaatcctccaagggcttcgaaacctgcatttgacaagcctggctgatgagtcgagtcccggccagtttaggaacaagaacccaagacaacaggatcctagcccagaaataattccagctggatcttgcatccctacagaagtagggaggtggctgtcctaggggaatacgtaaaagatgtccaggacggccgggtgcggtagctcacgcctgtaatcccagcactttgggaggctgaggcaggtggatcacctgaggtcaggagttggaaaccagcctggccagtgtggtgaaagcccatctctgctaaaaatacaaaaattagccgggcgtggtggctcatgcctgtagtcccagctactcgggaggccgaggcaggagaatcccttgaacccgagaggcagaggttgcagtgagctgaaatcgcgccactgcactctagcttgggcaacagagtgagacttggtctcaaaaaaaaaaaaaaaaaaaaaagtccaggacttctctggggagcagtgggggttcatagaggtccctccctcatctacttgatacccttcaaaagtgtggattaggccaggcgtggtggctcacgcctgtagtcccaacactttgggaggctgaagcgggtggatcacatgaggccaggagttccagactagcctggccgacatggtgaaacctccatctgtaccaaaaaatacaaaaattagccaggcgtggtagtgtgcacctataatcccagctacttgggaggctgaggcaggaggatcgtttgaacccgggaggcggaggttgcagtgagccaagatttcaccactgtactccagtctgggcgacagaatgagactctgtctcaaaacaaaacaaaacaaacaaaaaagaagtgtggatcctggagcatgtgacacaggactgcaaatgctgctggagggaaaaggagggtccccttccccacccagactatgaagctgccgttcactgtgtcccagtccgcacaggacaagaacttaaggccacactttccaaattgtgtttctccagagtcttggggttctgtgaagcacctgggacaacaatgataggagaaagagaaatatcaggcctgctgatgctccacccacatttcacttcagccagactacattcttttataaaactaattaaaaacttggtttaaatttttcttttttgagacagggtctgttgcccaggctggagtccagtagcacaatcaaggatcactgcaccctctacttcccagactcaagcgatcttccagcctcagtttcccaagtagctgggattacaggcgcgtgccaccatgcccaactaatttttgtattttgtgtagagacagggtttcgccatgttgcccaggctggtctcaaactcctgggttcaagtcatctacctgcctcatcctcctaaagtgctgggattacaggcgtgagcataaccactttctatattagatgtttgggacagacagaaatctcaaactcaaaggcctaatgaggccaagaaagtcacatgagtgaaggcggcctggtgtgagacaagagggagtgctggggactgtggaaaaaataggccctggggagagtgtggctgcagtgcagctgctgctcattgttgctctgtaagaaggtggccccatgcagctagggcttccaacagttctttaatgtatgtatgtgtgtgtgtgtgtgtatgtatgtatgtatgtatgtatgtatatatttatttgggaccgagttttgctcttgtcgcccaggctggagtgcaatgccgtgatctcagctcattgcaacctctgcctcccaggttcaaatgattctcctgcctcagcctcccaagtagctgggattacaggtgtgctccactacgcct

SEQ ID NO: 94287 - DNA, 58805 bp, Homo sapiens
  misc_feature (1)...(58805): n = A,T,C or G
gcccaccttggcctcccaaaatgctgagattacaggcgtgagccactgcgcccagccttcagctgttaaacctaagagttgagtcaatccctttctttaagtaattcttaaggtcttttccattaatgtactataaccctaatttaattacagtgaatatggaacttgtttaggaagtggtactaaaggattttttaaaatgaatagaaaacattagaatatttataagtacaaaaaggagaaatggaagaaaaaggataaagttttccaaactcagtctccatctctatcaaaaaagctatatctggggccaggtgcggtggctcacgcctgtaatcccagcactttgggaggctgaggcgggcggatggtctgaggtcagtagttcaagaccatcctggccaacatggtgaaacccatctctactaaaaatacaaaattagctgggcatgatggcgcccacctgtaatcccagctacatgggaggctgaggcaggagaatcgcttgaaccagggaggcggaggttgcagtgagccaagatcgtgccattgcactccagcctgggcaaaaagagccaaattccatttcaaaacaaaacaaaaaaagctatatctgaaaaaaatgtatctagaaacttctccactagttaggtacctttgctcaaaattgttattaagtgctcagatgacttaaataaacaaacaaaccacagggcccagtctattaagtagatgcagcacaataaggaaataaattttattagcatccatgaaatctcacattattaagctcttagcatctatcatggcagcaaaataaatcagcttttagccacacttcaaaaagtttccagattcttaaactatcttgagcaggatctaaatagtgataccattgctgatgcttggacatgcagaacggaggaaagcaggaattaacaggtgtgatcactctaacttcaaaaataaaaagtaggtgcagttttaccttctctttatcattacaaagtaagcaatcaactaaagacccttcattaatttctctaaaatcctggtattgttctattccatgattcataactggctacaaagtttacttaacatatgtttcaggttttaccacttttctaatcccttggctactgtatatacattttggaagtatcactgattgtattttcaagtccatcaattcaacagttcatcataggttcatttagtgaggtattaataaaagttattaatagaagcagggttgggccaggcacggtggctgatgcttataatcccagtactttgggaggctgaggcaggcagatggctggagctcaacagcagcctggacaacatggctaaaccccatctctaccaaaaatacaaaaattagccaggtgtggtggggtgtgcctgtggtcccagtcattctggaggctgaggtgggattgcttgagcctgggaggtggaggttgcagtgagccgagatcatgccactgcactccaacctgggtggcagagtgaggtcccatctcacaaataaataaataaatatttttttttaaaaaagaagggctatcagaacttattagctacctaagcagaaaaaataaaattaaagttaaaaagttaaaaataagaacttactaacatcagtgttgctaaagttggtatacaccccctactgctaaatttgactggcttaagaaaaaaagaagcagtggtgatgtctcactactgtcccactttatggaacatgcatcttggcaaagctggctataaaatacatgtctacaaagtgaatcaccgtttaccctcaatgaaaatcagtgctgcatcccctagctgaaaatcccaagtgttcagttgaaaagttttccattataaggactaagtaaagctgctggccagctgtgcagcaggcaggctggatctgatattaaggtacaccaacctgtgaagactgaagtctcctggggttctcattcccctcagaccacattaagaatttccccccttctggaatttcccagatgttgaaccagccaccagaacctctcacctgccctggtgtccaccatgccccgactctaaatgcatgctttccaaaatttgactcctttccttttctttgtaggggagcatgtatatttaattgggcaagatgggcacttcacaattcatcaccgtgtgctcctttctagttcacggtgaacaaataatctaaaaatgccttcagtttaaagcagcaacaaccacaaccatgtggttctcaaggtttaaaaagtttgtatattgggcaaaggctgttgagatgtttatacatttcctgatttcaagaatattcatgtcctggttgcttaacacatcgtttcagctgtttttaattagggcaaatccctttatatttcccaatcatgagcagtttaatagtactattaattcattcaacacttattgaacaaatattatagattgcctactgtgtgtcaggcactgttctaaggtgctggagagccaacaataaacaaagcaggccaccatccccatcagggagaggttagttacactgcaggaaggcagacaacaatgaagacaaataagtaacatatatagtatattaggtggcagtaagtgctacagggaacaataaagaaggagaacaagaagtactgaaggtggggtgcaattttacatattttataaaattgttttgacaataccatcaggaagtatttgtcttaattttcacttctttttaaaaaattctgacacataaacatgaaaatgtggacagataagtaagttcctctttacagttgcaggtacctcttttaacaggtactgaccgtcaccttgaagtctaaaggcgtggtaaactaaaagccagggaaggtgaaatagccggataacaatgtgtccagaaaaccacacagttgctctggtaattttcacaggaactagatataatacaaccatttgcaagagacatttcaaaatgatttactaaaatgagtatgtagtatttccttctttttttttatgaggaaacttactaatatgctatccacctaattcatattggtaaatgtgaccataatactgatgaattttaatgtcttttaaaaagttatgattgcatactgctaagctgttatattaaaagaataaatagtctctccaaaaaaaaccccaatatgattcccactcacaagcaagaacaagaagggaaaatattggtgggaaggaagctagagtgtaggctgaaggtaatggtgggtacagtaaaggaatgctctagttaggactcctgcaggtcactgagtaccaccaatggaagtgacattgagtcttgctaaaagatccacctgaaatatcatgctttggtgagcagtggtggcattatgaatctttgaaggtcaaatgacatataatcatttttcacatctaacattaacttttatagttttgctaacaggcatactttctagcataataaatcactgactaaagaacatttgaaagggaggaaaaaagagaaaactctaacaatagtaagaaaaaaagcccagtgatagtaccaaaaaataaagaaggcaaaggaaacaatggataagccataccaagaattgatagggccgggtgtggtggctcacacctgtaaccccagcactttgggaggccaaggcaggaggatcacttgagcccaggagttcaagaccagcctgggcaacatagtaagatctcatctttattataaaataaataaataagtaaataaaagaattgataggtgttggagtacaatatgaactaggtaccgaaacagatgctgcaagggaaatacccagggcagcagtgataccatcataaagagcatagaaaataaaatattttaaaatgtataataggttgccataaacttatatgaaaatgaagaccattgtctataaagtgttcacagttataggtaaaattagaagaggtgtccagtcattatgcaacccttaatggcaaacactccttctgtttctcccgtcctggagcctcctctcccttcctattcttcagggactagacctgaaagaagaaatcctgaaagagaactgcagacttcattgtggggtttgtgccaggcaccttttggtctgtggggtcctaaaattcagctccacctcacatctagagtctcaaaatgatccagtcccagagtttgaaatttttcagcccagagtgggatgtatttttccaattcatcagccaaaaggaactgacctattaataattctcgcaaaggcaaaaagtggccctgggtaccacagatcaatgactgagacatctattgttgtcactataattgccattatatatgtcatctgttttcagttcccttttcgtttcccatcctttgctgtttccctctacctatgttctaggcttgcacaagttctgtttggctctggctggcagcacacacagagagctagtttgctgacccttattaatgacatcaggatatatgtggctatatatagcttaccactaactacgtgtcaagcactttgctaaatgttttacaagtaggatctaatttaattctcatagcaaccttgtgacattttatctctatttcacaaatgcagaaacaggccctaaaaggtgaagtatcctgcccaaggtcatacagctaacagccctcatagcatagatttgaaacctaggtatctggcttatcccaaagaataatgttcttttacattaagcaataaagcctgtgccctaaaaccatacggacttgaattccaaaccctaatgccaccacttaccagttgtgtaatttgatgaattattcaacctgagtttcctggagaatgaaacagagtaacatcactttaataagtgcttgggagcgttaaataacctaacatataaaaactgtctagcacagttgttgtgggacattgaaatcaagtcacaatattcaatcccgcccttccctctatttgattatccattatagaggtggcctcacaaagacaacactaaggatatgcaaaaagtgcagatgatcattaagtgcaacataaatggttgatctgctcggtcccaacgggttctggccgtgcgcttcctccacaatcctggtgtagggaacccaaaacactagacagaagaatcttgaagctggaggagaaacgggagctgctagactacttctcacaatctccttgtttaccctgaaatcaagagtcacctcttcccactccatctgccagcttctcgggtgctctgaagcgcgcgccccccgctcaactgggcattggcttcaccacggacgtggtgtgggtaccctatccctctccccgcgtggtgctgcagcgatttcgggacctgtcacccttctctgggccacaagcccgaccctctccgcccagggaaggagggcggatcccagcctatccccagccccaggtgcgcgagcgccaggcccaggcggggccttgcggcccggagctgagccccgagcccgggctcctccaggaggcgtcggcggtgcctgggtccagccaggccgcgacctagctcgggagcctccccgcgacctgccgatccccagctgcgcgaagcccacggagcacttccagcagcagggcccggcgggacctgccgcacggagcctgcgggctcggatcctccaggccaggactttccttttcccccgggcggtacggttgctgggctgctgcctcaccggcccaggaattgggagacgcccgcactcacgtgggagtcttagaggtggaagtcgagcgacggtggagaacaggttggcagcgtccggagcgacgctgggaccgcagggattcaggagaacctagggctggactggcagagcaaggggggcggggagggggcggggaggggcggnnnnnnnnnnnnnnnnnnnnnnnnnnnnnnngatcagcccatccgcagggagctgactccgggctgcatgtcagctccttgccagtaggctggcgcttcgaggccattctggaggccagtcgcttactgaaaaggcaaaactgactttaaggtaagtggtttggtgcaccaaaataaattccttaaggattaaataatttaaatatttgagaaaatttatgccatatctgaactgagaagactgggcgcagtggctcacacctgtaatccaaacattttgggaggcagaggtgggaggatggcttgtgcccaggagttggagaccagccccagcctggggcaaaaaaatgagaccccctccaccgctacaaaaagtaaaaaaaaaaatagctgggcgtggtggcacgcgactgtggtcctagctacacakgaggctgaggcagaaggatcacgggctcaggctgcagtgcgccatgttcgtgcctctgcactccagcctgggtgacaaacagaccctgtcttaaaaaaaaaaaaaaaagttaccaagacaaattatcaacatgaaaatagcgaaatacatcttagctgttaaccatgcttatatgcttatttagggcattcttaatgtgcacactaccaaggacattttatatccttcattacctttaatcctcatgattctgtgatgtatttggtgccagtatacccattttacaaatgaaaactgcaattgagtaacatgagatttggaagctaaataattggcctacttttctgaagtcacacaaattgtaagtaaactaacctcaaagtgcaggctggactgcttgctactccatgctgcctgcagctaaacaaaacactatggaaaatattgatacatgactgctcgataatttagaacttcttcccaaggaaacagggacaaaatcaataaaacacattgggaaaaatattggtcccaaacctgacagagttagtatcttaagttcatttattttttatttttatttttttgagacgcagtttcgctcttgttgcccaagctggagtgcaatggcgcgatctcagctcaccacaacctccgcctcccgggttcaagcgattctcctgcctcagcctcctgagtagcttgggattacaggcatgtgccaccatgcccagctaattttgtatttttagtagagccagggcttctccatgttggtcaggctagtcttgaactcccgacctcagatgatccacccaccttggcttcccaaagtgctgagattacaggtgtgagccaccgtgcctggcctcttaagttcatttaaattgataagaaaaaaaaaaacacccaatagaaaaatgrgtgaaggttttttttaattacagaagaaatggaaagggtatcaaatgaagaaacacagacattcttaagtaaaaactttactcttaatccaagaaatgcaaactaaacatttttattttatttatttttaagaaatggggtctcactatgttgctcaggctggtgttgaactcctgggttcaagtgatctgccagccttggcctcccagagtgctgggattacaggtgtgagccaccgtgcctggcctgcaaattaaacrtttttaaaatcgtatcagtgccagtgaggattcattcatttattcaacaaacacatcctgattgcctactatgtgcattgctctagacttgtgagcaagacagacaggaacttctatcctagaggacggttgaatcttaagttagttgttaaagacaaatgagatttcagccagccagaagtgccatgagaaaagttaaggcagggtgatgtgatagagggacttgaggatagtgtgagcttatttagactggggatctgaaaagagctctctaagatggtatttgatctgagatttgaaaaataagcagcagccagttatgcaaatatctggggcacaggaatggtagcaggggcaaagataagaacaaactgccagtgcagaaacaaggcctttgttgctgaagtgtactggggaggtactacaagtgttttagtttttactaaaggtttctggctctatttttgattctactttcacatgtaaatgaaggttcttaggcaccactaattggattgcaagtttcaaattttccagaatatatagtatccatacctaaccttcaaaacttttctttacactaaaatagggaaagagtagaggcaaggggatggttttgtacttttagtatccaaacagcaatctatcatctaaatacatagtgccatagctattcaatgtatttattcattttccttaactacagtctaaatcccattctacttttgttctcattcattcacccattaatttaacatgtgttgaattcatgttagataccaagcctaacaaggttctagaaataaaacaccacctggtggagagttaaatgcatgttaaaatgaaagatattcacaaaatattctttctcctatgtattttgatcctcatatttctaccttcactctttcagtcacatttttaattamctcatcctgtcttatagcttttttttttctttttctttttttttttttgagagacaggttcttgctgtcacccagccaggctgggatgcagtggtgcgaatacgattcaccacagcttcaacctctcaggctttagcctgaggcgatcctcccacctcagccagtagctgggacctacaggcacgagccaccgtgtctggctaatttttgtactttttgtagagatggggtttcaccatgttgcccaggctggtgtcaaactcctgagctcaagaaatccactggccttggcctctcaaagtgctgggattacaggcatgaggcaccacgcccagccttagtctcagagctttgaattccatctatattttctctctcttttttttttctttgagacggagtctagctctgtcaccaggctggagtgcagtggtgcgatctcggctcactgcaagctccacttcctgggttcacgccattctcctgactcagcctcctgagtagctgggactacaggcacccgccaccacacccggctaattttttgtatttttagtagagacggggtttcactgtgttagccaggatggtcttgatctcctgacctcgtgatctgcccgctttggcctcccaaagtgctgggattacaggcgtgagccaccgygcccgaacttctttaattttcttttcttttttttttaaagacggtgtctcactctgttgcctggactggagtgcagtggtgtgatcaccgctccctgcaaccttggacacttgggctcaaatgatcctcccagctcatcctcctgagtagctgggactacagcatgcaccactacatgcagcaaattaaaaaacaaaaacaaaaacaaaaaacaaacaacaacaagaaaaacatgtttttgtagagacagagtctcactrtgttgcccaggctggtctcaaacatcctgggctcaagctgttctcccgatttggcctcccaaaatattgggattacaggtgtgagccactacgcccagcctatattcttaaggttatcaaacttccacacctttcctctgaaactccacactccaactctctatgctttacttggctgttatattagttatcagttgctgtgtaacagattacatcaaatttagtggcttaaaacaggaacaatcatttattatctgtcatagcttctgtggtttaggaatttagaagtggcttagctgggtgcttctggctcatcatctctcttgatgttgcagtcagatattggccaaggctgcaatcatctgatggcctgacgggctgaaggagttcttcagcccaaaagttcaattgtgccaaggctgagaaaccctgctttaaaccgatgggactatacatttaaaaaatactaatgtcgtgaaagaccaaggctgacgatttaaagatttaaagaaagtagaaacataacaaatgcaagacattatcaagatttgatcttgaatttagaaaaaaaaatcattagtataaaggacagtattgggaattaaacaaaatttgtatattaaataatagtattctgtcaatttcagtttcctgaatttgataattaaactgggactaagtaagggaatgtcttgtttctaagactgaagagtcatgatatctgtaatctactctcaaaaggccttacaacagaaaatactaggaatataatatgtgtattataggtaagatatgtaaagaaagataaagcaaatgtgagaaaaaggtaacaatggctgaatctagctgaagaatatatgggagttcctgcaacttttcttaggatctaatttttttttcaaagctaaaaacttaattacaaattcactctagcagagatatcagaaacttaatttcactgttatcatggtatccagtggcataaacatttagcaatgttgagggggtagctgccagtagaaatgcataaaataaaagtgattctgtctttgggaaaaaacagctaggtttcagaagttgggaaggagatctatatatttttaaagatagactttaaagacataatcctaaagaaatacagctgatttaatgggactagtggaggtagcaatcatatagtagaaggagcactggactcaggagtagaaagacatggattcctgtcttctaacatatccttggttaggttaatacatctctttgagttacagttttttcatttgtaaacctgggataccacttacttcacaaggtagttcggaagatcaatacgactatgtattaattccctatacagtattaaaagtaccatagaaatgcaacctaattttttaaaaccatgactcgcctcccttattacccataagatttttcgttaaacccatatagtaggtactccctttgcagtctgtgtttccacccaccctgatcaggcctcaagtaggatccaaaatttcttcattttcccacaaaagaattccactcgagcaagaaattttattttactcgagtaaaataaaatactttgctcgagtaagtaaaacatcttattgaagaattttaggggagaccagggtttgtttttgtttctgttttttactacacatgccctagcattcaagggcatcagtatcctttccagaggcctcctcccgctagttcctcttcccaaaacgctttgcattttttgtttctttgctctggactctctcttgaatctacccccttgagtcgctcagtcgaagagactgagactttcccttcttcatgttgggcaacataattcttccaattatttacttccaaaaaagacccactagtaccaagannnnnnnnnnnnnnnnnnnnnnnnnnnnnnnnnnnnnnnnnnnnnnnnnnnnnnnnnnnnnnnnnnnnnnnnnnnnnnnnnnnnnnnnnnnnnnnnnnnnnnnnnnnnnnnnnnnnnnnnnnnnnnnnnnnnnnnnnnnnnnnnnnnnnnnnnnnnnnnnnnnnnnnnnnnnnnnnnnnnnnnnnnnnnnnnnnnnnnnnnnnnnnnnnnnnnnnnnnnnnnnnnnnnnnnnnnnnnnnnnnnnnnnnnnnnnnnnnnnnnnnnnnnnnnnnnnnnnnnnnnnnnnnnnnnnnnnnnnnnnnnnnnnnnnnnnnnnnnnnnnnnnnnnnnnnnnnnnnnnnnnnnnnnnnnnnnnnnnnnnnnnnnnnnnnnnnnnnnnnnnnnnnnnnnnnnnnnnnnnnnnnnnnnnnnnnnnnnnnnnnnnnnnnnnnnnnnnnnnnnnnnnnnnnnnnnnnnnnnnnnnnnnnnnnnnnnnnnnnnnnnnnnnnnnnnnnnnnnnnnnnnnnnnnnnnnnnnnnnnnnnnnnnnnnnnnnnnnnnnnnnnnnnnnnnnnnnnnnnnnnnnnnnnnnnnnnnnnnnnnnnnnnnnnnnnnnnnnnnnnnnnnnnnnnnnnnnnnnnnnnnnnnnnnnnnnnnnnnnnnnnnnnnnnnnnnnnnnnnnnnnnnnnnnnnnnnnnnnnnnnnnnnnnnnnnnnnnnnnnnnnnnnnnnnnnnnnnnnnnnnnnnnnnnnnnnnnnnnnnnnnnnnnnnnnnnnnnnnnnnnnnnnnnnnnnnnnnnnnnnnnnnnnnnnnnnnnnnnnnnnnnnnnnnnnnnnnnnnnnnnnnnnnnnnnnnnnnnnnnnnnnnnnnnnnnnnnnnnnnnnnnnnnnnnnnnnnnnnnnnnnnnnnnnnnnnnnnnnnnnnnnnnnnnnnnnnnnnnnnnnnnnnnnnnnnnnnnnnnnnnnnnnnnnnnnnnnnnnnnnnnnnnnntttatttctcagttgcccgttttatctgcataacgtcaatgaaggttgtcggcatgttgtagtctcagttctggtatttctattagcactgctcgtgggcctctgtttattcttgtcagggaattggaatggcattaatgcatatgatatatttcacatgaactaggggtttcattattttaaactcaaatttttaactgctcagttaaaatctttcagaattattatgggactgatggtggggaggggtggttaaaatttggcatattccccttccttggaagtttataaccaaatggggaggttatagataatataggcagagagatgggaggagttctaagtatgaaactagttagccgtaagttttcaaattggaacaatgatgagtttgaagtcccattttaggcctggccccttggctcagcctgtaatcccagcactttgggaagccgaggcggaaggattgcttgagtccaggggtttgaaaccagcctgggcaacacagtgagaccctgtctctacaaaaaaatttaaaagttagccaygtacatttttatatgtagtaattactatatatgataatcttgtctgtaagattcatttttattatgtgttggtgtctcatattttacttcatacaatttgcaatatccatgcatttgcaaataagttgtagcaaataagttgtagctcttcctttccagcaggagtgtgatttttagatgagcgrcgactccaggggatatctttttctcaataagatacgctttgagatagttttactaaagattttgatgaagtaatttttaagcttccagtattatgatcgattgctttgggggtgggagaaaattcatgtaatttttgcttggggtagcagtaccttcaaattttcaaagtttgtaactcttaacataattgtttccataggtaatgggaaacccaggaactttcaamagaggccttttactctcagctttgtcgtatttgggttttgaaacttaccaggttatctctcaggctgctgtggttcatgccacagccaaaggtaagcataaattagatatatggaacatttagagtttttttgtgtgcgtacattcagaatttttattttaaaacaaagaatcagggtaatgttaataatagaaaatccatatggaaatattcacaatctgctcagtgagaaatgggaaaacaacttccctgcctaactgccaacctactgtttgaggagccagaagttgacgtgaagttggaagaaggtcaccttttccagctaaaccccactccatagctatgtgcatttttatttgaagtctccgtgaccagaggaaacagtgagaactgagaaccaagataccgttatcagcaagggtttggctaaagggtctgagatgtgtaagcaccaagaaggggaagggaaattgagcaacatatgaaaaaggggctgtaggaacacagaaaaaataagtcaacaataacctatttccatccagagcaaagggacagtgcacacatattcatcctctcaagtgtgggctacactgtacattgactcatactatctcgaacatggtctgttggaaagattgagaccccctaagggcacttggcataggaccacagtgacatggtaacagacatagacaagcatggcatgaccctaaaggcaacaacacacctttagataataatcgttcagaaaaaaatcccagagctgaggttataaattccaagttagctataaacattctttggggaattcctttaaagatatgagttaaaataaaacaaaatcaacacctaaaatctcctaaagcacaaaatggagaaataatgaatctctaccaagaactgattattttaagtttctcatttggatggctctcccaccagataggtggtgggattacttcaaaagtaatgagtctcctacaaggaggagttgtttggtccagtgagggggaacaagctttctagaaataactttcccttcccttgactccattcaaaattagaacccatcaaccaccattaactacaatgcccatattagttaataatcctagatttcaagtactactacatgtaaactattaaaagaaaaaagttccaaaggaaatcaataactttattatgtaggcatatgacttttatgggaaattaagagtttccatctgaaggacagaaattgtcaagaggtaatgtgcagacttcaggcaccacataatataccctccaataatgaactacatttctccctaaattcttcatattgcaygctaacctccccagcatgaaatcttctactgtataacctctctttaaacacctccctccaatctcaatttccttctgtttttattatttggcaaaattacacttaaaaaaataaacatttccatcatgggacatgtatacctatgtaacaaacctgcgcattctgcacctgtatcccagaacttaaaaaattatgtaattaaaccagagggtaaaataaataaaactcaagttaatttgccttgtagagctatatggaagtgaggaaggtgctcttacataaaccccstctgccttccacactcatatrtatatcttcttcctgataagtctgaggttgggggaactgcgccttacttttcctctcctatatcccctagtgcggcaatattagaacccaaggaaggaaaaactggcaaagttgtcatatgccaagtggccattgcctcctgaaatgaaggtaggttcacttggtctctcctaagcagaagagaatgtccaggaaataaaatatttaaaaaaccattgaaaatccaacaaaccccagccttgaggtgcgcatggagtgcgtgggataagaaaggaatcaagtagcagcattcagaagcagtcctgggttcatcctgatgaggtctctcattcagggagaggtggctttcccatgctgggagggaggtggaaggaggcatgacttagacattggtggtggtctccttagcagcctggatgctgttcatctccatgatgccatccttcccagatctatctgcaccatgtgcctgcctttyaaaggcccatgtgatatcctcaaaagccctgccatgggtctcagggactttgaagaaggtaaaggtcaagaaggtgatgaggaagctrgcgaagataataaaaatacaggctcctaaataataagcagcagaggggaagagcagtccgactaagaagttggaggtatagttggagcagccggccattgcagtcgcagctgggcgggggccctggctgaagagttcggccacaataaaccaggaaatgggacctggtccaatttcaaaggccacaaagaccaagatagccccgataaagacaaagctcatcccattatactcatcctttaataacaaacagtcatgagcatggaacaaaaagccatccctccaaggcctatcatatgcagggtccgccttcctgccctttgcagcagaaatagggaaactacagtgaagatagtattaaacacacgtgcaccaatggtggcatagatgggctcttgaacacctgcatccttgaagattcctgttgagtaatagaacacaacattgattccagagagctgtcgagagagctggagcacaatggaaatgatgattggctgttggtagctggatactctaaagaactccagcacggtgacttgcttttcttgtgacatccttgcactctcatcttgcatctcctggttgtcttgggatacatcctgggtgccccacaactgctggaggatctacttagcattctcctcttcttttctgttaatgagcaaaaacctgggactttcagggcaaaatggaagggctgcactttgtaggatagcaggaaggatggtaaagcccaataataccggccatagctcttcagacccaaggatgaatttgaattccagaccaaagatctgggccaccagaattctgacaatgatgcccagctggttgagagtgccaaaggtaccctgcagggcagtagctgagatctctccaatgtacatgggcataaaacctgtgcacagtccacagaagaggccaataaccaagcagcccagggtcagcatttcaaccaactcagctgctttacacaatcccataaggcagccaccagagacagccaacaggttgacgataagcattgaattgcacctgtcaaaaagtggttgataaagagtctaacggaaaaggagccagtcataccaacaatggagaatatggccacagacaaggaccagagggacgtgagcaacatctcagagggagggatatttgcctggtcactcaaagtgttattgataaattcctttatgatcatctcaggagcactgatgactccmgtgttgtagccaacttggaaagagccaattgtagcaactgtaatggcaacgatcagagctggggtgaccttctgtgtccgcatggtcctaatctaattcttttcaagtcttcaataaagatctaggagtgtgattccagagataactttttcaggcaacaaaaccttcaaaatgtccttctcagaaacgagttttctccaggtcctcaggaatgctctaaactctcaccattacagcatctctcaagttatttttgttatttatttttttttttgttttgtttttgttttgttttgttttgttttgagacggagtcttgctctattgctcaaggctggagtgcagtggtgcgatctcggctccctgcaacctgtgccttccaggttctagccattctcctgcctcagcctcctgagtagctgggattataggcacgtatcaccatacctagctaatttttgtatttttagtagagacggggtttcaccatgttggtcaggctggtctcaaactcctgacctcatgatctggccgcctcggcctcccaaagtgctgggattacaggcgtgagccaccgcacctggcctaacttagttatttttatataggtaatggagctaacattgctgtggtctagattattttctgcctttctctatgtgtctgtctaatatcatgtatatatannnnnnnnnnnnnnnnnnnnnnnnnnnnnnnnnnnnnnnnnnnnnnnnnnnnnnnnnnnnnnnnnnnnnnnnnnnnnnnnnnnnnntatatggctcacaaagcctgaaatattttattctctggatctttacagaaaaagtttgctaatccctgctttatagtgacaaaatgaaaccaatcccggggtgttatattcttcttgatttggttaacaaaaggctctagtactttgagatagatagattttatttacaaacagaatgctgcttggtaagtaacaagttgaaagcgaaaaaaagaaaaatccatcaaatttcttattggcgtaatatagataagtaaacgtatattaaaacttggctgggcatggcggctcatgcctgtaatcccagcactttgggaggctgaggtgggaggatcacttgagcccaggagtttaagaccagcatgggcaaagtggtcttaaacaaagtgagacccccatctctacaaaaattcaaatgattagctgggtgtgtgatgcgtgcttgtcccagctacacaggaggctgaggcaggaggatcacttgagtccaggaggtcaaggttgcagtaagccatgatctcaccactgcactccagcctaggcaacggagcaagaccttgtctcaaaaaaaaagacttgccagttaaaaaaaaattagttaaaccaattgtgagccaaaatttctgtatattagagcaatatcatatgaagaaattaatgagtgaagcttttttgttttttacaatcctcactttttaattataaaggagagggtgattggggaaagaagcagagatttgattttgaatagatggtcttattcaacttctgatagaagaatttgagaacatgatctaaagrttgctagttatctattgatttcatttatctgtgattatctttccgttaaaaaagcagataattgagaagccctgcactgttctttttttttttttttaaatgtatttatgaagaaggacaaagcagagaacttggttttgttactggctgaatgatatattttggcaaatacttaaaataattcatctttttaaagcaacctagactttaattctcacagcagccttataaaatagttaggacaagtcttattatcttatcacattataataatttttgaaaagaagttcacagagttaaacttcttgaaagtcaaaatgttagagtggagattagaacttttttttttttgagacagggtctcactctgatgcttaggccacagtggcatgatcacaactcgctgtagcctctacctccccgggcccgggtgattctcccacctcagcctcacaagtagctgagactacagatgcacaccaccatgcctgcctaatttttgtattttttgtagagacgaggtttcaccatgttgtctgggctggtcttgaactcctaggctcaagcaatccacctgcctcagcctcccaaagtgctgagattacaggcattagccacgacacccagctccttatctctatttcttctttgaatctatcacatttagtttcagtgtattttggtagcattatagaaatgattgtaaagatgtagtgctttctgaagtaacaaaattcagtactttgaaagggaaaaccagaattacttttggctttatcrtagtccatttttttcttgtttattttttttccaacttttattttagattcagagggtacacgtgcaggtttgtcacgtgggtaaattatgtgttgctggaattcggtgtacaagtgattttgtcacccaggtagtgagcattgtacccagtaggtagctttttgacactcgcctacctcctgccctccccattctagtaggccccagcgtctattgttcttgtctttgtgtccatgtgtactcagtgtttagcgcccagttaacaagtgaaaacatgcagtatttggttttctgttcccatattaatttgcttgggataatggcctgcagctgcatccatgttgcagcaatggatgtgatttgggtttttttaaaaatggctttatagtattccatggtgtgtatgtatcacattttctttatccagttcaccaytgatgggcatctcagttgattgcatgtgtttgctaatgtgaacagtgcagtgatgaacttaaggacgtgtgtgtcactttggtagaacaatttgtttttctttgggtatattctcagtagtgggattggtggatcaartagtggttctattttaagtttttttaaagaaatctccaaactgctttctacggtggctgaactaatttatattcccaccagcagtgtataagtattcccttttctccacaacctcaccagcatcttttttttttttaattatttttttttgaaattttaagaatagccattctaagtggtatgagatggtatctcattctggttttgatttgcatttctgtggtgatagtgatgtgaaacattttttcatgtttattggctgctgcttgtatgtctttttttgagaagtgttcatgtcttttgcccattttttagtgggattgttttttgcttgttcaattgttttaagttccctatagattctggatattagacctttgtcagatgcatagtttgcaaatgttttctttcattcagtaggttgtctgtttaagaaacctgtcgatagtttcttttgctrtatagaagctctttagttaggtcccatttacctatttttgtttttgttagaattacttttggagactttgccatgaaatctttgccasggcctatgtccagaatggtgtttcctaggttttcttctaggtttttatagttgtaggtcttatatttaagtctttaatccrttttgagttgattttgtatatggtgaaaggggtctagtttctatcttctgcatatggctaggcagttatcccagcaccatttattgaatagggattcttttctccattgcttgttatggtcagcttttttgaaggtcagatagttgtagatgtgcagctttatttctgagttctctaacctgttccatggcctatgtgtcagtttttgtaccagtataatgccgtttgggttactgtctcrtagtatagtttgaagtcaggtagtgtgatgcctacagctttgttatttttgcttaggatcgccttggctatttgggctcttttttggttccatacaaattttagagtagtttttttgtaactctgtgaaagatgatattggtagtttgacaggaataacaaataagaatctgtaaattgctttgggcagtaagaccattttatcaatattgattcttcctgtccatgagcatggaatgtttttccatttgtttctgtcatctctgatttccttttcattgtggtaaaacatctaactgtattcctaagtattttattatttttgtggctcttatgaatgggattgcgttttttatttggctctcagcttgggtgttattggtgtatagaaatgtactgattttcatacattgattttgtaacctgcaagtttactgaagctgtttattagttccaggagcctttgagcagactgtttatggggttttctaggtaaagaatcatatcatctgtaaggagagatggtttgagttcctttctttctatttggatgcctttcctttctttctcttgactgattgctttggctaggacttccagtactatatttaaaaggagtggtaagagtgggcatccttgtcttgttccatttttcaaggagaatgcttccagcttttgcacattcagttgttggctgtgggtttgtcatagatagctcttattattttgaggtgcgttccttcagtgcttagtttgttgatgttttttaaggtaaagcgatgttgaattttatcaaaagccttttctgtgtcttttgagatgatcatgtggtttttgttttgtttttagttctgtttctgtgatgaatcccatttattgatctgcatgttgaaccaaccttgcatctcaagaataaagcctacttggttgtggtgtattatcttttcaatgtgctgctggattcagtttgcaaatacttttttgaggatttttatgtttatattcttttttctttttcttaagacagggtctcactctgtcacccatgctggagtgcagtagtgcaatcttggctcactgcaacctccgcctcccaggctcaagtgatcctcccacttccacctcctgagtggctggggctacagttgtataccactaygcctgggtaattttttgtatttttttgtagagtcggggtttctccatgttgctcagggtggtcttaaactcttgagctcaagcaatcggtccacctcagcttcccaaagtgctgggattacagacatgagccaccatgcccrgcccatctgccttcacctgagttaatgacctgaagttttccttttccattgtgtctctgacaagttttggtatgagaatgatgctggcctcatggaatgagtaggcaggagtcccttctctttgattttttggaataatttcaataggattggtaccagcccttacttgtgcattaggttgaatttggctatgactccatctagtccagggctttttctggttggtaggttttttttttttactactgattcaattttcgaacttgttattggactattacaaggatttcatttcttcctggttcaatcttgggatgtttctaggaatttatccatttcttctgtgttttctagtttgtatgcctagaggtgtttgtaatagtctctgaggatttttatttttgagatggagtttcactcttgttgcccagactggagtgcaatggcacgatctcggctcactgcagcctccacctcccgggttcaagcgactctcatgcctcagcctcccgagtagctgggatcacaggcatgcgccaccacrcctcgctaattttttatattttcagtagagacgggatttctccatgttggtcaggctgtctcgaactccccacttcaggtgatctgcctgcctcagcctcccaaagtgctgggattacaggcatgagccaccgcacctggcctggtttttgtatttctctggtgttagtgttaatattcccattgtcattctgattatgtttatctggatcttctctgtttctttttttttctttctttctttttttttttttttgagatagtgtcttgctctgttgctcaggctggagtgcagtggtgcgatctcagctcactgcagcctccgcctcccgagttcaagcaattctcctgccttggcctcccaagtagctgggattacaggtgtgtgccaccatgcctggctaatttttgtatttttagtggagacagggtttcaccatgttggtcaggctggtctcgaactcctgacctcatcatccacccaccttggcctcccaaagtgctaggattacaggcatgtgccactgtgcccagcctctctttgtttcttgattaatccagctggcagtctataaattttgtttattcttttgaagaaccaagttttggtttcattgattttttttgtatggctttcacatctcaattttgttcagttcagttcagctcttaattttgttattttcttctgctagctttggatttggtttgctcttgtttctctgcttcctctagatattatgttaggttgtcaatttgagatctttctaacttcttgatacaggcatttagcaccataaactttcctcttagcactgctttagctgtgtctcacagattctgggatggtaaatctttgttttcattagtttcaaagaagtctttgatttctgctttaatttcattgtttacccagaagtcatgcaggagcaaattgtttaatttccatgtaattgtgtggttttgagagatcttgatattgatttctatttttattgagctgtgatcygagagagtgcttggtttgatttcagtttttttttttattttgttcagaattgctttatggccaagcatgtggcctatcttagagtgtgtgccgtgctcaggtgagaagaatgtacattctgttgttcttgggtagggtaccttgtagatgtctgttaatgtccatttgattgtcaactttagatcctgaatatttttgttagttttctgccttaatgatatgtgtagcactgtcaatggagtgttgaagtctctcagtattatggtgtggttatctaagtctctttgtaggtctctaagaacttgttttattaatccgcgtgctccaatgctaattgtatatatatttaggatagttgtcttcatgtttaattgaactctttatccttgtgtaatgttcttctttgtccttttttatcattgatgatwtaacatctgttttctctgaaataagaatagcagcccctgctcttttttgttttccatttgcttgatgtttctccattccttttctttgagcctgtgggcatcattgcatgtgagatgagtctcctgaagacagcatacaattgggttatgcatctttatccaacttgccactctgtgtcatttaagtggggcatttagcctgtatacattcaaggtccatactgatatgtgagaatttaatcctgtcatcatgtggttagctagttattatgtgaacttgattgtatagttgctttacagtgtcgctatgaacttaagtgtgtttttgttgtggcaagtattggtctttcatttccatgtttagcactcctttaaggacctcttgtaaggcagatcnnnnnnnnnnnnnnnnnnnnnnnnnnnnnnnnnnnnnnnnnnnnnnnnnnnnnnnnnnnnnnnnnnnnnnnnnnnnnnnnnnnnnnnnnnnnnnnnnnnnnnnnnnnnnnnnnnnnnnnnnnnnnnnnnnnnnnnnnnnnnnnnnnnnnnnnnnnnnnnnnnnnnnnnnnnnnnnnnnnnnnnnnnnnnnnnnnnnnnnnnnnnnnnnnnnnnnnnnnnnnnnnnnnnnnnnnnnnggttctctgcatttcctaagtttgcatgttgtatgtgtgcatgctggcgaggcagtgggcagaggctctgagtgagtgtgcacctgtgggggtccagcttcaaaagtcctcccttgggaaggtgggggccactggcaagtgtttcaccaggacagctgaggctgtgctgcctacgggtgcggccaggcagggaccctgggagaggctggcagacaaggatgttcagatgagataggccccattccgtgcacaagacagccctgctctctccatgtctggctgctaataaaggctaagaccacctagaggagtatggtgaccttggggaatggatacccatggcaatgctgcactgtagctgttcccatgctaaaccctctgttctccacaaagactagagttctctctctggcagctctccaggtagttctccctgccatttcaaatgtcttggaggggtcttagggtctcctgcagctaggatctctaaggtctgtgatgagagtgggccactccacaccagtttcacttaccctttccctaggagcttctaggtgccaggaatgagtcttggtgcttggcaaccccatgcagggttcccagcttcctcctttttcagattcagggtctgtgtcctccccatatccactctcaatgtcttctttctgartatctgttcagcatgtgccagtctactcgatgatggtctctctcagtgggagaatgtcatgtcttcctggctgtgcctagtcagccatcttggctcctctagtttttcaaaagtgtcttgaggacataaaaagttactacatatttgtttatttttattttttgagacagagtctcgctgtgtcactgagggtagagtgtggaggtgcgatctcagctcactgcaaccactgcctcctgggttcaagtgatcctcccacctcagcctcccaagtagctgggattacaggcatgtgccatgatgcccaggtaatttttgtatttttagaagagatggggttttaccatgttggctgggctggtattgaacctcaagtgatccgcccaccccaaagtctggaattacaggcatgagccaccacagccagctgatatttgttaagttaaaaataacattttaaggtcctaggcctctatgaggcctgcacaagttggatgaggccttcatagccgcagtaggggagggtgagggagtcaaatgatcactggtttctttcacacttcaagaagcttttgttttttgagacagagtctcgctctgtcacccaggctgaagtgcagtggcatgatcrcagctcattgcagcctcgacctcctggactcaggcaatcctcctgcctcggcctccctagtagctgggactacaggcatgtgtcaccatgcccagctaatttttgtatttttggtagagacggggttttgccatgttggccaggctggtcttgaattccttgcctcaagtgatctgcccaccccggcctcccaaaatgctgggattacaggcatgagccactgcacccggcctcaacaagtttttatgccactttccagcattctcttttctacctcttaagtgagctaagctgtggagttctgtagtctattccattagcaatttctaaatacgtaatacattattattaactatggttatcatgctgtacagcagatctctaaaccttattcctcctgtctaactgaaacttggtaccatttgaccaacatcaccccattccctcctgccactcaaccccagcctctggtaaccgccattctactctctacctatgtgagtttgacttttttagattccacatataagtgagatcatagagtgtaggtatcccttatccaaactgcttgggactagaagtgtttccgattttggattgttttggattttggaatatttgcatatacctaatgagatgtcttaggaatgggacccaagtctaaacatagagtttatttatgttgcatttatatcttatgcacataacctgaaggtaattttatacaagattttaaataactttgtgcatgaaacaaagtttgtgtrcactgaacaatcaaaaataaaagtgtcaggtgtggaattttctacttgtggcatcatgttggctctcacaaagttttggattttgaaacatttcaaattctggattttcagattagagatgttcaacctatatttgtctttctgtacctggcttatttcacttaacatgtcctccacttcatataatgttcatccacattcttacaaatgacagaatgacagaattttcttctcttttaaagctaaataatactccatttgtgtatgtgtgctactttttttgtttaatccattcatctattaatgggcacttaggttgtttcctaaggcgtggctattgtgactaatgccttagtgaatgtggcagtacaaatatctctttgacatactgatttcagttcctttggatatacatccaaaagtgggattgctggatcatatagtagttccatttttagtttttgaggaacctccctgttgtattccataatgcaatagctttattttcttaaaacaacaaaaaaatcactttataattagttgctcggcatgtttatataatttgtgagactacagaccatagcccttgaaaaaagattaattgaaaaatacagaaacacttttttttatcctggaaaatgatccatatgtttctataaaaatataacttcgctggcccttagaagtttttctttgtcctatatctcttccatttgctgttttttttttttaaggaattgatcttcaaataattccatgcttcaaaatttctgcttaattctcttttgatctgctttatgcttattcaaagccaatttaaaagctctttcttcctccattttctggaactaagttatattctgaagtgggagttttttggaaatgagttgaagtttaagggcataaatatcattgacattttagttggatgggattataggatgacttttaaaatggttatatctatatttatcaccaggtggtaccagatacccacttgttaacaggaactgaagcactcctgtgggaacgtttcattatctctttattattattattattattattattattattattattaaggcggagtcttgctctgtaccccaggctagagtgcattggtgcgatctcatttcactgcaacttctgccttctgggttccagcgatttccctgcatcagtgtctcaagtagctgggatcataggcacctgccaccatgaccggctgatttttgtattttcagcagagatggggtttcaccatgttggccaggatggtcctgaactcctaacctcaggtgatccacccgccttggcctcccaaagtgctaggattgtaagtgtgagccaccacgcctggcctcattacctccttaaaatagacaaaatttaaagccccaaggtatgctaatacattcatagtactctttgtgcatatgaaagctcatgtgtaaaatgcttaaaagataatcacaagtgcccaacttaaaggttcttttttattttttagtttgtttttgtgtgttttttaaaatttcttttctgtttttgtcacagtcattaaaggttctttatcacttcacttgtgttttcatatatattttcaaaattcctctttattgatgaacctacagaactgagatcagtgttcctttgtatgtagttatttgttgtacttcagtgcatttttggttgcactgttgctggtactgctgagacacagtattattggtatgaaagaattgccttaaactttgatgatgttactgctacttaggggcttgaatctagatattcagattttctacttcttaagtcttatatagagaaatctcaggaatatagctatttatcttgccagaggagtattcttgtcttgacactgctcacatggctagagtacagtcagctagaaaagtaaaaaatcaaagtttactaacatatatgtaggrggtcacatcattggcatttctttaaaaaattctaattattatgatcttgcacatatctattttaggttacatttaagatttcactatacagttttaggtgaattaacatgtcatttcatcttagaatatttgcttattaagttgaaaataatttacattaaaagtttagtstgttttatagaatatggtctctatgttagtaatgtaacttagttgtaaatattttcaagatagtataaaatgttaggttagaaaacaactgatttgcggatatgtggagttgtctacaagctctcacccgagtgcctatgtcagtctgtagtaccataggaagtgtacttttttcttataaattgtacagtgtttgattttagaaaaaatcatacactgattttttgcagtgcagaccacgaggtcaagacatcaaagccatcctggccaacatggtgaaaccctgtctctactaaaaatacaaaaaattagctgggcgtggtggtgcgcacctgtagtctcagctactcaggaggctgaggcaggagaatcgcttgaacttgggaggcagaggttgcagtgagccgacatagtgccrctgcactccagcctgacgacagagtgagactccatctcaaataaataaataaataaataaatttatatatatatttaaagccattatattatagcttatagtatttatgtaatttggagctaagttatttgagagattataaaagaatgcacacaaaaaagatttagattattcactaaatttctacttttttttttaaagatatggtgtcttgccatcttgcccaagctggtcttgaacttctggggtcaagtgatccttccacctcagcctcccaaagtgttgggaktataggcgtgagctgccatgcctggctgacaatttctacatttttaatcgcatgagtaatgtgatttagaattcctggatcatgttaaggacagtaattagtctttttagtaagtcagagaataatcaatgaatatatttaaaagtaacttttttacttatacatactatgtacacattcaaatatgccagatcaatatatttaatattaattttctttcactgctgtgacaagctcagtgacttaaacaacacaaatttattatcttagggttctktagttctgtatcttgccgttcagaagccaaaaatgggtctgactggctaaaatcagcattgggagagctgcattccagagaccctagggaatattccctttctttgcttttttcagtgtctgtaggctttctgcattctttggctgaaggtgtcttcctccatgttcagaaccaccatcaaatcatcattctgatcttgtttccattgacactccttctctgacttttgccttcctctttcacttttcaggactcttgtaattatattgggcctacctgggtaatccaggataatttcctgttttaatattagctgattagcagccttaattctatctacagttcaccgttgacatgtaaccaaacattcagattccagggattaagattggggcatctttgggggccattattctacctaccataaatatcaactaaagaataaagactactccttatcctttgggttgttaaaacacaaactttgtgattcagccacgtatccgataaaaatatagaatagagtggaagcaaaatttgaaaaattaaccagccatatgaatattattaaactttataacacctaatcagaatgaagtgggattactgagaaaaataatctttatttaattttaggggttttttttgccattgtcatttaatttcttaactagtataattattacattatgatgttaacttaaaaacacgattgcatcacaaatttcattgtatttttctttttgctaattttttaaaaactagaactacccccatcccccccctttttttttttgagacagagtcttgctstatcgcccaggctggagtgcagtggagcgatcatggctcactgcaacctctgcttcccgggttcaagcgattcttctgcctcagcctcccaagtagctgggattacaggcgcacgccatcacgcccagctaatttttgtatttttagtagagatggggtttcaccatgttggctaggctggtctcaatctcctgacgtggtggtcctcccacctcagcctcccaaagtgctaggattacagatgtgagccaccgcacccagccaagaaacccttttaacctcaagtatactgtgattaattaaagtataccaagtgtatacacattggaatsttggcttaggactaagtagtacagtacccttatagaagacaaaattaaatgtacatgtttctgaataataattggaatttcccgaaattcagactgtttttttcattaagtagacagttttcttagggcactacactgtcaataatgtttatgtattttgtagtcatatataaattagttttaagagtcagtcagagcatagtgtcagtaagttccagatttagtgtgtagttagcttcatctaaatttctgatgacagctctgaccctttgaacaacatctctgtataaagagaatttattaaaacagtgtggtttggttcatgcaaattactaacattcagtgctgtttaagtagatgacttttattttctacaatggttggtagttaacagcagcaacaacaaagactgtgtagagcaagcttgtccaacctgcggcccctaggccacatggagcccaggacagctttgaatctggcccaacacagataagtaaactttcttaaaatattatgagagtttttggaatttttttagctcatcagctatcgttagtgttatatttattgttagtgtttcatatttagtcactaccagagtaagttttctaattttttatttcccatgatttcaataaatcattttttatgatagcattatgcttatttctactttgtttccatctaggttcttcctaatttctgctgtttcattgtaggtcatttctgtatctaatttcatttgcttatatataaaagtgtttaagtttctttgaattattgtcatctgacttgggaagacctattttattgtgtcttttttcctttataatctttgaagttgaagaaatacttgaacaagcagactacctgtatgaaagcggagaaacagaaaaactttatcagttgctaacccaatacaaggaaaggtaagcaatgtaggataggcctaggcttgtggtttcctcaaaatttttgttatttaacaattaaaatgacccttagtgcttgaggttttaaaaattgattattgtagtttttacttcaaaatatttcttagagtttaatttataatatactatttgtttcttacgttaaatgctgcatgtatctcattgatttagaaaaggtgttactactttagtggaatgttgaaattttttttgatttttccattttgctttagatgatacaagatagttattgaatatatgtttatcccttctagctatattgtatatttctcattgtttttcttttaaagtaactttttattggtatagattaaatgaattcactgagatgtaggatgttgcatgccaccattgagtggtaactgtgtattactttagaaggatagtctttcagagaaaccaaaaataccccctttttctatttttattattagattgtatgtttagtgtagaatatcagtgtgtactcatttttgggaggagtgtggagcgagagaaagactcaaccctatgaagtaagtcatatggctaaatagcatttctagatcactaatctacctcatctcctaaactaaaaatattgagtcattttcatctgccttttttagattttcaaaaccagttttctccccaggacccatcaattttactttctaaatatctacaggattgatcttttcttctccattcttcccttagtaattcaaggtggctggtttggcattttattgtcatttcattgataacttgaaaaataagctgtaaggtagttactccatattcattgaatgataactatcttaattaaaggaagctttagcttcaaatttttttttatgttaaaaaaataaagttaggattaaaggcaaacatttaataaaaaagaatttattatttattttattttattttatttttttgagacagttttgctcttgttgtccaagctggagtgcaatggcgcaatcttggctcactgcaacctctaccctccaggttcaagcgattcttctggctcagcctcccgagtagctgggattacagacatgtgccaccacacccggctaattttgtatttttagtacatgttgatcaggctggttttgaactcctgacctcaggtgatctgcccgccttggcctcccaaagtcctgggattacaggcgtgagccactgtgcctggcggaatttaatttttacaattatttctgtcagttgtggtggttaataatttattaaccatttcttatgtcattatatggaaatggcagttcttcaaagaatccaatgctcttacttgaagtaacccatgcatcatggcatggtattcaaacataggatttattttgagattacattatattcaaccattcattcattagcaaataattgtcaaaaacwattttgtgtcaggtgctgtatttgagactagggattcagcagttttgtatttttagaacatgaccctgtctataaaatttatgtattttatgatactgtatgaactactgagtgagttatttgaaacacagtgccagtgaggccaaacctcaagttaatatgttgagttttgtagggcaaatgttcagagaatttgaatgcaaagatatttttgaaagaagtattttagatactagaggtaagttaatatttatggatattagacatttttataggaaattttagcaagtaaaggttttatattaaagaaaataataaatttagcattattactaatggcttttgatatcatgttgctagcttcctaagctgaaagaccataatgtattcattagtaatgtaacccttaacaatttttaaatgtgagctaaaatggttgttttatattttatttcaaattagtgaagatgcagagttactgtggcgtttggcacgggcatcacgtgatgtagctcagcttagcagaacctcagaagaggagaaaaagctattggtgtatgaagccctagagtatgcaaaaagagcactagaaaaaaatgaatcaagttttgcatctcataaggtgagttgcttaactaagctattaaccatgtactgagaggtacattttctatatttttctattatctctgatttacattggaagaacaatttctctattttaagtttttttttctttttattcaatcttatatcttaaggataatttctctattttaaagaagtagggaagatagttatttttataagtttttcaaaaagaagtctttgtttttgtaaacatttggtctaacttcatatgtatttgataaattacttttgwgaatgcttatttttaaacaggagtttagtaatttcatgaattacctatatctatattcttagtagtataagcacttcacagatgttttctcattttccttacgttatatttctgttttatttagaggtaggaatataacagctagacaactgagacctagaatgacttttcacatgtaacttagctgctttcaggatttcttgttggttcacaacaacgtttttcagtaaatcgtacggggagacgaggtggtcattagccttctggattgttggacttcatagaacccaaaggcagggtgaagttggaccttgggaaacaattggcttgattgctccgaggcttcattaattgtttctctactctgctgttacctgaaaatctttttcattgcagacattttttttctccttatcctaagtcttgtgactttccacagcacctgggtttttgaagtgtggctattttagattcatttcttgggaaagaaactcaggtcatctcagtttgggtctgccgtccaactgtggctgtggagacaaggtcacagttgacattgtggctgttcttactataacaatgcaatgtgagagtagatggaactccaagaaaagagaatgagaaaataaaacattcaattacatattcttctaaattgatactcagaccataaacatgaaccattatctcattgtgttggtaactttcttggaaaattcaccactttctaccttgtattatagttctctataaacatgtcctatccctgaggtttttttgttttgttttgttttgttttagacatagtctcattctgttgtccaggctggagtacagtggtgtgatcttggctcactgcaacctccatctcccgggttcaagtgattcttctgcctcagcctcccaagtagctgggattacaggcacatgctaccatgcccagctaatttttgtatttttagtagagataaggtttcaccatgttggccagggcctcaaactcctgacctcaggtgatccatccacctcggcctcccaaagtactgttacaggcgtgagccactgcgcccaaccctattcctgagtttctagagggccatgtccacttctctttatatattccattacatttaatacagtttttatgctcagtaactttttgttggatgagaatgactattgaagaatattatacagttttaccttgtattgaatggaatattaagaatattattgttcttacacttttttaaattttcagtggtatgcaatctgycttagtgatgttggagattatgaaggcatcaaggctaaaattgcaaatgcatatatcatcaaggagcattttgaggtactgatgaattattcaaattcatgaattttaaaagtcatatttttctgaatagatttttgttttcattatctattgctgtatatcaaaccacctatgataacagtggagtagagccatgacagtttgttatttcttttttttttttttttttgagacggagtttcgctcttgtcatccgggctagagtgcaatggtgctatctcagctcactacaacctccgcctcccgggttcaagcaattttcctgcctcagcctcccgagtagctgggattacaggggcacaccaccacatctggctaatttttgtgtttttagtagaggtgtggtttcaccattttggccaggctggtctcaaactcctgacatcaggtgatccacctgcctcggcctttcaaagtgctgggattataggtgtgagccactgtgcccagccgacagtttgttatttcttgcaattctttgggttaactgagcgcagtggcacttctacattgcttggtatagctggggtcatttagacagctgcattcacctgggccctcagctgagactacagtgtccaagatggcctcttacctatgagagtttctcctcacttgtttttttatcacttagttgtctagctcaaccttcattatagcatggtagtcggcttccaagaatgagtgttccatgggaaaagatccaatgtacaaagttctagcaagcctctgcttgcatcacacttggtaatatcctgttaatctaaacaagtcacaagggcaagcccagtttctgtgggaggggagcattgacacaagttcctgaatatggaaagcgtggtccagtgtaacagtctttaacacaattgacacaccactccttgtagtaataattctatttaagattgatatctgtgtgtatattgtatgtgtgttttattaaaaatattttcccctaaagttaattatttatagtaagctgttaggtgcaaagaattgcataggagtctgtatatttcttaacatggatgaacttcattgtctcaaaaaaaaaaaaaaaactaccacaaaaataccagcatatttatttctcttttgagattataggaaggaaaaatgatggaaacatacatagggatagtgctgaatttgctatttaaatagtttttcataattttatggtttagtgtcaattcctagtttatataacaactagtgaaaaagaatgactgggagtccagagacctagcttttcttgttcaggtatggatagtaatatatacataataactgacattttataatgtaacaatttacctgtttcacagtttaaaatccttgaaatgagattacatgatgtaattgctggaaccttacattgtagttggcagtgatactttctttcttagtggcacataaactaatggtgtgtcatttttgatattttagattcagggaaatacagtaattttctcagtggcattagataaattgcttaatttctctgtgcctcaggatgtagaaatacatgacataacttccaaagggaataatgaagaactgtagaaaatacacaaatgtatactttccatttttttaaaaaacagtgaaggttatagattataaaaaacwatgttttatataagctttcaaatgtacatgtttatattttaaatggcaatatttagtatttacatataaaaaagatcatttatactgcttacatttcaaattccattatatatctaaagtggtaacatctttggattatttttgaaagaccagtggcaggaaggattgattataaaagagtttgcttgaaagtacccctctcaacccttctcataagaaaattaaacccgggcctgggcggctgcctccacgatgccactgctcatcgaggggcagcgagtgcggctgccacagtccgccggggacctcgtccgagcccacctgcctctggaggaaacagccagatgtatcagaggtcagtctgttcaacaactgggaccccagggccttctgtatgttcagcaaagagagctcgcagtgacctccccaaaggatggctccgtctccattttgggttctgataatgccactacttgtcacattggggtcctgttgcacacaggttatggsgccacctgcttgacacattgtgatggaaccgacaccaaagctggggtccccttgatcatgaactccataaagtctttttccgactgcgctcaatgtggaagcctggaagtatacctcgtgggaggcttcagtgatgtgggaggcagttgtcacaaaaactcactcattaacttcttagtgaatttgacaggcaagaagatgacattcacttagtgatactatgattatgtgtgacagaattaaatgaccaggaagaaaacgaataacactttctaataatatatggcattgctgtcaacttaagactgcaaagatttacagagcctcctttcttttttttgtttgagacagagtctcctctgttgcccaggctggggtgcagtggtgtgatctcggcttactgcagcctctgcttccagggttcaagtgattctcctgcctcagcctcccaagtagctgggattacaggcgcccactgccacacctggctaatttttatatttttagtagagacagcgtttcaccatgttggccaggctggtctcaaactcctgacctcaagtgatctgcccacctcagcctcccaaaatgctgagattacaggcataagccaccgtgcctggcctacagagcctcctttcaagatcgaggtccagaggagcagctgcgtgccgcgtgagctttagcaggaggaccagtgattagcatttacgatgcaaagacagaacaacttcgtataggactgtactcctggacaccatttccacatgtggatttctgcttgcagcaagatgacaagcaaatactagagaatctttccacttcgtgtctggccaagccaccccactttgttgaacatattagatctaccttgatgtttttaaaaaaaaatactgctccaactaacacactgtttcctggaaataaagccctactctacaaaaaaaatgaagatggcttgtgggaaaagatctcttctccaggaagctaaaaaaataggaattaccaaagaaagcagaaccttcttggcctgacagagaccattggtggggccagcaagaatccaaatttggaacctacatccattgggtcttargtcttctccttccttcctcagtgtttttcaaatgactttcaaaataaaaccttattttggcaaaggcaaaaaaaaaaaaaaaaaaggaaaattaattaaaccctgatccccccaggcatccattgtgatgaattaacttccttcctatgcatctagaatgggactacagtatttctgtatcattcttaggaaatagaaaaaaatagttacttacacaatttttttgtagggcttaatttttagtggaactcccaattgagaaaggttgcttagagcataagttgcatataaacatgttaagatacttatttattttttaccacaaccttatgagttaagtacatgacttttccataaaagagaaaaaactcagttgtggtaagaatatagatcttgcaaccagttcaaggtcattaagctgtgacttgaatcctggcagtctggtttcagagaccatgctcttaaccattacaaatatttgaaaatgtgtacctcacacattactaaactgaaagcaaaagtgtgggtttatagaaaagcataaactaggaaatcttaattttttcaaaaagagtccttttaatatgaacattaatctgtaagatttctttagttgttttcaacaaaataatggataaaaggaggaacagtttctttattctgtagtttatattcacatagtaaatataaattagggagattcaacatattttacattgcacataattattctattaatattctataaactgtttatttttcctttggtaagtacagatggggaagttgaacaaaatctgcatacaagaagactttctaaaaatagaaaagactttctaaaatctgcatagaagagactttctaaaattacattttttctaaaaaactaaaatgcacttttcttctttaggaaagaatgacttttattcagtattcatctacagtttgccaagaaagtacttccttatccatttttcctttaatttggaagaaacattaagagctatagattaatttgcaagattaatttgcaaaattaatccatttatgtatttcatgttttttctcatcttgatagacacttactataaatgtctgaaccatacaaaatagtaacattagtataagtcattaatagtgttttgaaatgaatttaatcaaagaatcaggaggaagaaagttgatattataatgggagaactgaaacacacagttgcattttttaaaaaatcatggcttcttcagcaaacacagtaaagcacttattggtgtttagaaaacaaatatgatttatttttctcatttcttgttagaaagcaattgaactgaaccctaaagatgctacttcaattcaccttatgggtatttggtaagaaaatttctttaaatatttcagtagtatttagtgtgatattttgtagtatgtataaatatcttcttttgcatatataaaagatattaaatattttaaaatattatctgacagagcttagagtgctaaatccattaactagcccttgtatatatattgttagaacatactaaatttgattatgaccatgttaaacattgttaytcaggtcatttagaaacatgtacagactgaaaagactattcytatttaccatgctaaatgaaattagattaatgtaactatagtaaaacagtagaatgccccaagagggtctttgtatcttcaaagtgtgtcagatacagtcttgattaatctgaggaaccatataatctgattttcagtatctttctatttttatgtgatcttatgtccactgtagattattattttgctggtatgaggctttatcaaagtgttacgtacttgatggtttaagagtctgttttgagatagatgggacactcttttgagtatagcctgcagagctgaatatttactgccatctaagaagggtaccagtgtaaactgtcctgtatcaaactcttttaaaagagaaatatattcttcaggataaaggacatattaagctaacactcattcactgaggattaatgataattgaggggcagtcactaagtcagatgctagtaagcaaacccaaatgaaatagcaatttctgccttaaggacttcagaccctagtcaaagatgcaacactttctttcctacttatttctgaaagttgtaaagatctttggaggttaatcatttgctttgctgctttaaaaatagatttaagttgttggttgctgttatttatacatttgatgtttagctttgtcatttttcttgtgtaaggtttaacttctctgagtttttcttataagaaaaataggggaaattatcctatctcatatataattgttacaaggaataaatgagagaatcaacccactacctggcacaatgcactcagtggtagatgtatattatattactgttattagtatgactgcttactatttatatttaatcacaaaatacaccccccagctaaaggatcactatgtcaatctctggattacctagtagatatcatgtaaagcacaagttgtttaaacatacagtagaagattccttttatagtattaagatgcttagttaactttaagagaaaagaaggtacaatttgaatgtataaaattgttttatttccctgtaggtgctatacatttgccgaaatgccttggtatcaaagaagaattgctaaaatgctgtttgcaactcctcctagttccacctatgagaaggtagtatgatgtcctttgttaagttagtacggatttcttaaccacagcgccattctaccatgtgttcacacatgtggagctctgattcagtgagggacttgagcaatttctaatgatccaattcaactgtgttatcacaaggcttaacacttattatccttgactggtgagtggttttctttttccccgttaggtgagtggctggtaattctggaatactgtcatctaaaatggctcgtggctaaaatctaccttcattttctgtttgaaatctaaactatattgaagtcataaaatagaacaagaaatacagcatctgttacccagcatgttttagctgtattacacacaataacagaaaagtaaagcagatgcttaagttgataaaagaagaacactcattataacttctattttaaaaagcatatgaaaggttcatattctctcatattttcaaggccttttgcttttcttgttaaaaataagatttgagaggaatttctggttaaactttgggtttactcatcacaagcttttcagagtaagaaaacaggcaatcgaaaaagctgtacttgtattatttacattataacaaggagcttttttttctttctgggaagctatagtgtagaaattgatgtaaaaaatacttagttgtattctttacacacagttgagaaatattattaaaataatgcaccaatattttataatggtattattaaaataatgcccatttgctggacacggtggctcatgcctgtaatgccagcattttggaaggccaaggttggtggatcagttgagcctgggagtttgagaccagcctgggcaacgtggcaaaacctctgcaaaaaaaatacaaaaattagccaggtgtggtggcctgtgcctgtagtcccagtcactcagctaagctgagggagaaggatcacttgagcctgggaggtcaaggctgcaataaacagtgattgcgctacagcattccagcctgggcaacagagtgagacctggttctttttttttttttttaagacaggtcattttaaggacaaaaaatatagtcagctctactttatcaaattagttatgtttctagaaatcaaatgtcattagagaatgcattacaaaaacagtagcttaagtaggacaaaaagagtttcagacttaacattgtatgtaggaatttcaataataatggactcttaaaaattcactagtacaacgaataaattcagcttttgattatattttgtttttactaaaaatcactagttatgatttaagagaactgtcaaaatagctgagttacacgtgataatgttctttcctttctgcacatgatgttagtttggtacaagttctaaacagcaaccaagttattaccagaagtagtccatatattgtaatcttgatgattgaagtgttacgttcactttgggtgttaactctcactgttgaagaagtgaccattattttaagatgatttacttcctgacttaaatataatatagcagtagatctttgagacaatgcttttttaatattgtcttctttaatcttttttattatgtttgggctctttktttttgacaggccttaggctactttcacagggcagaacaaggtaaggtatttttgattacacatattaatatagttaaaattgtatgaatgctgaatatatactataatagcaatgtctaaagcagttgtttattctgttatacttatttttgtgctagatactgtaraacaatttttaaagtctttattcagtaaagatcacctgaatgagaaataggctgctattgaacttagagctgcagttctggaatgtctatcatttgatgtaattctgcttcctttgtgagagcagtctctgacatggtaattgtcttattcaagactgcacatattggccagatgtggtggctaacacttgtaatcccagcactttggaaggccaaggcagaaggatcacttgaacccaggagtttgagaccagcctgggcaacatagcgagacctcatctctaccaaaaaataaaaataaaaattagccaggtgtggtagcacacacctgtagtcccagctactcaggaggctgaggcaggaaggtcacttgagcccaggagttccaggctacaatgagctgtgattgcaccactgcactacagcctgggccacagagtgagacttgtctgaaaaaaacaaaaaaagattatgcatctcattagaggcatttaaatgggaattctgctattcagccaggctagttctattgcagatattgtgaaaaagagtttcgggttatgtttgttttgaaaaaatgactagtcctatgaaactgccaccagcccatcctaaatttatcctttttaatattcatacaccaagtgggggagataagagacataagcatatgataccaaatagaccataaaaaccattgaaatatattctataaaacttaatcaggagaagacataccatgtttattaaatttgagatcccacacataatggacttgttcatttcatgataacagttatcttctacagaattttatctgaatgttttatctctgtaattcatcaattctgatttattcattattaccttcactgataccctctcttgatcatactgtttcacatatcatgaatatgaatctagggatgactttttttaacagatttaaaagttaattacaaagtaaaaatataggaccttagagacttaagggttgggggtgttgagaaaaacatggtcctaccctcatggagctaaaataatccctggtaacttcagtcattcttgagtgaccttaccttatttctttctggcctatattcagttcagaggctcctctgatgcccttagtatcttttatttttccagtgatacttatcactcaatactatgaacatttacatgtgtaagactgtacattctgagaagatgtggactttgtcttttctggctcacaattgcacactcattacttggcacaatgcttggcaaatctgttgaatgactgagtaaatagatgaatgatcggatgattgaatatacgaatatatttaaccccaggacaacttaagtatatcaacatggcatcacacaaatctgctcaaataaaagaagtaaaacaattttggttaaggagcaaatggagttaatcattaattgtatacaggaaaaagtatgctttgaatacagaggatctcagattgttagggggacactttgtgaagaattaagttggtgagataattccatgttttcattcataggctttctgtttatgcttttctttcagccaagaatgttctccacttttttttttggtttcttgtagcacttcaaagtttgtatatctagtaaagcattcctttcatttttatattacatttagttgtgttcatgtttctctcttcattataaagttgaaaaaaacagaggttttgtttcatcctctatgtttaagtatagctgacatccagtaaatgttgatcaaatatatatatgtcatcatcatttcattcacttattcagccgatgtacactgaatgtatgttatgtttcacacactgttgtaggcacgtggggtaccatagggaactaaagagattaaaaagagtattgctgtcctcaaatagcatacattctatcgggagcttcagcttctcatctataaaatggagatacctacttacaaagttgtgaaaatgagaaatgtgtataatgcagtgcctagcacatttgtagatgtttattcattggtaattattattttacaaatatttgtttgagatataaacagttgaacaaaagagaattcccattagtctaatcacttattgaccacacaaatttattgaaatttagacctcagaaacaaacctttaaaaataaaagcaacactgtttcctctgagatcattttttctttcttatgtgcagtggatccaaacttctacagcaaaaacttacttcttttaggaaagacatacttgaaactacacaacaaaaagcttgctgctttctggctaatgaaagccaaggactatccagcacacacagaggaggataaacaggtaaaacatctcccataaagtaaggcagaaaggttttgaggcactattaaatggtgaattaagaacttctttaaaagcataattttctaaatgcataatattgttgaaaacaagtgtgttcatttcaagtgtaaattgattgacatttatatttctatataggaaataatttagttactatcaccaggtggatgttacgggttgcctgctacaatgcagaattattcctgtttgacacacatggcagatcgagttaacatttctaaaacataaaagtcatgggatgtgtactaaagtggaagagctgagagtctcatctggtcactgtcaagacattttattgttataatgtcctatctggtttttggaaactcttagaaaccccactttataaacttaaatttcacaagttagtctcttagctctcctgtttacttataacatgtatttttccattttagatacagacagaagctgctcagttgcttacaagtttcagtgagaagaattgagaacttttcagagaagatttatgaartagctaataaacattgccttttcttttaattctaaacttaatatatgaactataactgttctacggctttttaaatgttgtgaccatttaaccgtgtaaatataaaatattctaggcttcttcacaaataatagggtaaaataaataatcgccataagastggtagaaataaatctccatggctcaggcaaagagattattttgcatcctggataccagcaatgcaaaatggtatgagatttctaaggattgatcacattgggatgggagatcaagcaaagaaatatttgtagaggaggggaaatggatctataggggatatacagggggatggattttcaarttggattgattctaagttgaaatcttgaagagaaggtgtggtgacagtggttaggatgttgtgggttcctgacataaagtagttaaatgatatatcttggagctaacctgtgtaagtaaagaactaagtaaggagatgactaaaaatggagtagtttccttttttatttttttgagacagagtctcactttgtttcccaggctggtgtgcagtggcacaatctcggcccactgcagcctccgcctcccgggttcaagtgattctcctgccttagcctcctgagtggctgggattacagggttgtaccaccacactcggctaacttttgtatttttggtagagatggggttttgccatgttggctaggctggtctcaaactcctggcctcaagtgatctgcccrccttggcctcccaaattgctgggattacaggcgtgagccaccgcacctggccagtttactttaaatgtggtgtagtctcatggtaaactgaatttgtcatcagatgcaaagttctattccctaatggaatggaaggaacacaaaacttaagagtgaaatggaatactaagatgtttttaaataggcaggactatgctactcacttgaggctggagtgccaccactgcaaaatctttttaagttttgtaaaaaggagcatcttgaatccacttagataaagagagactgtgtgtgtaggtggatttttcccaaaggatttgggaattgtaatgttacaatgaactgtatggatatgtttgtcatgtacattttcaaamaaaaaggaaaactgaaagtagtgatctttgtatacccatctcttagattcagtgattttgctatataggttgtgtatcccttatctgaaatacttgggactagtagaagcatcttggatttgggatgtttttccaaattttggaatacctgcatacacacaataagatatcttggagatgggacccaagtttaaacacaaattcacttgtttcatatataccttatgcacatagcttgaaggtaactttatataacattatttttaataattttgtgcattgagaccaagtttgcataccttgaaccatcagaaagcaaaggtgtcattatctcagccactcatgtgggtaatttgtggttggttgatgtcaccatcattcctgactgaatgtatatgctaccaataagcagttattttcttatacttattcatgcataagtacttaacagtaaaaaatatgacataactcgcayaggaacaaggatggcaaaaaaaaaaatatgacacaccactgatacagtgaaaaaataatgtggtcagggtagctaggcaacagtagcatcaccagaaacctgtatcagctgttaaacggcaacaacaatggcaggctttcagtttcccacttaatgatgctgtattttaaaaggttattgtatactgtaattttatttttgtaggtgaagagaaacagaagcagctgaagggccaggaagtggrtctttctagggatgtggcattctgctggatggctttttaaaatgggttttttcctttagggagaccgaataaactgtgttgtgcacctgcattttgactgtgacctgttatgtgaggtcagatgtggaattttctacctgtagcatcattttggtgctcagaaagttttgaattatggagcacgaatttcaggtttcagatttttggaaatagggatgttcaacctgtatttatacatgtgtgtttgtgtgtgtatagacacatacatttctaaaccttttgaaactgattgcaagcatcataatagttcaccccaaatgtgtcagcatgcattttctcagaataaagacatcttcctaaacaaacacaaaaccattatcacaactggagaagttaacagttctctaacatcatctaatatctacccatattcaaattttctcaaatgtccccaagatgtctcatgctttctaaaatcaggatccaaagattatacattgcatttgatttgttgctaatctttccatccacaacagttccccatctttttcttcttgcaacattgactttttgaataggccagtccggttgtcatagattctctcgcattccagattggtctaattgaccacactttgagaaccgctgttccaacttatttccaggactcaaattagttctattagatctttgcctgactttcacatttatcacttactgatttttcttttagcctttttgtttcattttcttggctcttttcatttatatcttccatatcccttattttacatttggttgtatctcttcttccttagatactttataattgccttcacatctgatatgtgtttgtctttttctccgaatttttttcctgattttagccagtcattcacatctgcattttgtttgtccagttctgagtttttaagttgctatttcaggttttttaaatatctaataatttaattcatattagcatattgtgttaaagtttactctcctttttctcattttcaatttctgctttagagtgactttattttttttccctagggrtgtaattttatgttgagttaccagcaatactaggtcatcaaatgggaagaaagggtctgggttannnnnnnnnnnnnnnnnnnntcatagattcacaaagggaaaaaaaaaaaaaaaagatcctgtgtacctttctctcagcctatcccagtgctaacatctcatataacctgtagtacaatagcaaaacctggaaactgacattggtacagaccacagaccttatatttaaattttaccacttttaaatgctcttgtgtgtatagttgtatgcaattctatcacatgtagatttttggtaactgccaccataatcaagatacagacctgttccgtcatcacaaagatccccagtgctgtccctttacagtcacacccatctacctcctcctctcccccacccatccctaactctgacagcactaatctgttctccataattttgttatttcaacaatgttatacaaatggaatcatacagtgagaccctgtgatactttttttcactcaacataattcccttgagacctaagttctatcaatagtttgtttctttttacagttgactagtatttcattttatgggcataccatatcaaccatatgctgaggggcatttaggttattcctgatttttagctattacaaataaagctgctatgagcattatatgcaggtttttatgtctacatagattttatctctctgggatacatgcccaggagtgtggctcctgggtccttttatcttcatttttcccctttactctctgagggttaggtttcttctgcaagacatggtgccttcccaagattctgattctgtgcactaagtctcttccatttgacttcccaggagcctgattccccacgtgtcacattggtccgtgacgtttccccactaagggtgagacccattactgagaacaaaccccaggaatcccttacattctccttcccgtgcagcccccacctgattgttcttgtgtggattccagagctgactgctggattgagatgcttatttccccacgtacatgtatatcaaagtaagttggtagtactctgtgttctaagtgttattacatacataggctatatctctccattatagatgtttccttccttccttttgaggatatgagtagaatactgattttggaaaatggccatgattctataaraacctaaaagctctcaatttcttgatggccaagttatctcaactgagtttttaatcatgggctgtgtrctagctgtgggtgttgtaaaaatggcttctctcatactcactttcctcatgtataaaataagcatcattaaagacaaccccaccaatttcatggaattgtaaggatcaagagaataatttatgtaaaggatttaccatgaataccagtaaatacaactactattatctctgattttgttcttggttgagaattgaggagagaaattttggaatataggagatgtcacttttggacttagatcaaatccwcagttgacctaaagcttggcttttaaggccaactgagtgttacaggagaacttttagttgtgtattatttcaacagaggaagatttttacttctgcaacatccaccamatcatcttaggttcaaccaaacattcagacttartaagtctacaataggctgtatttggcaccagtctactcagaaggctataggacaggaaccacacagctcaccagcaggacaattttgaacctcctytcagaagacggtcttctaacagcaatctatgaaatggtatctccccaggtgacagctcacggtcctccttaaaggacatacagttacaagagttttccactcaggtatgcccaaagctgtggctttctgtcgtgtatctggagatttcccagtccagatgcaacttaccagtcagggtcatatttaccaaaagcaaagctgcatggcaataaatacagttgacacataccatcctatttagttgtcagggtaggaagagctaggtagttaacagaagtcatcaggggaaaaggttttgttaaccttttcattttcaactacttgggaagtacatgggggggggcgggacaaacaaacaaaaaaaacactggtaagctgctttccctggaagacaaacaactaaactgatctaacagatagaattgtgttgcttaactgatctaacagacagaattgtrttgggcctgtgagctattccctgggccatttactggtggtgggggtgggggagtcaccaaaatgaagtagcaatataaacctgtctctgagcctccctcttgtctgtttcctcatgaactgtgttttgggcacagagagtcttgcactcctaatttctttcggttagtccagcacagaacaggaacgggaagggaagaaggggagaaggtgagtgggggaccatatttctacagtttttctgactgctactgggtagataaatcaagagctctgcctgtaggtcttggatatctataattgggtatgaaaagtggaagaccctgatgaattctccaaaacaaagctggttttgtctcttgtagggttctgtgtagcctcacctagtgcatcgtaatttcttacttgaggragaccagcaccctgaaaacgaactggaaagctgccttcttcagtcaaatctgctaaatcatacctacaatgaatgatattcaataacttctgtcatggcaaaatttatacagcagtggtaccatttgtaattctaatacttaactcttttatggtatacgcagtcctttttgaaggccagtttccctctatcacataacctgtcacatacattagaattttttttttaattctttaggcttgaaaattaccagagtgttcataataaggatttggaaaaggagtctattcaaccaagcagatctctgcctttctttcgtctttactatgaattctgaataaaatggagaacacactctcaatatgtagaaaaataaaattttggcaaaacaataattactgtttttctgtatgtacttagcagtgaaatatttataggcaacagattttaagaagtcagttccatggctattaaaaaatgtttaagttaatgaaatttacagtgcatattaaaagcatgatacaaatggaaatttaaaattttgtattaggaagcccagtttgctaaaagtagcattaatatcattcacatcagattttaatttgttacacatttttgtagttcagcaaaggcccctatgatgaaaaacaattaaaaagtgttatgacaaaaataattatctgtgtaaaaagggggagacccaaaagatttttcatatggttatttaattcagttaaatagaactgttatgaatttgagaggaatgaagatattcaaacactaacagaaaatyattagccttatattagagcattcaaatgcttatgtaactcttcaatccatctggcttcataaaaaccaaaattttgaacacaaaaaagtggcagagtttacattaccttttgtatgttcctaagtatgaaattgcatcaatttattatgaattaaatttgaaaagcatcacagatttaaaaacaaagtacaaaagagcctgattctttttaattccacaaatacctagcatctcaaagtaacatgtaaacaaacttctatgctgctcaatgaatccttccaatttcrataataaactaaatagtattggatctagtatatgactttcatgtgtaagttatggttctatccattactttaacaatattactgatgtaacagagaaaaattttcaactattgtatttatttaaaacaaactgacaagttcaagcacctgtcttcagaaaagccagcagcatttttttttttttaacatactcaaagtaagatttggcctaagcccttaatacctttctgaacagccatgcaactaaacaccctcaggagatgttacataagggagagaagaacatggagcaatttgcactttttcccctagataatattaacaaggtaaagcaaatccagatctttatgaatgaatggctgtcatgtttaatacacttggagctctataaaactagagccactatcatatatgtttatatagatatatatgtatttttaataaagtctctcacttgcttcaaaatttaaggatgatctttttcctggtcagtcatttcaagggaacaataaataaagtagaaaaggatgaactgttttgcatatttctgtggaagaacggaaaacatactttgagaggttcggaaaattcactgtacagaatgaacagcttatatacactatctgtgcaatttttcttggctggggtatttaaatgcaagagctcctccaaaataagaagccacattcattcttgtccaaatccctctgtctcttctattgcaaaaagaagtttttcctttagttgttcataactcttatatggtggtagatccaagcgattaaaactgaacagaaacaaaaacaaaatcagatgttttcaataaaatgaaaaaaatctaatagaatacttttcaaagcacatagaaatgctgaatggatatatgtatactatatatgttaaaattttgccagaagtatttagagtaatctaaatttaagacttacatataaaaactattttaacatctccaagaggaaaatggaattacaaataataagtgtagcaatatggataaagacaatttttaaaaaaaaaaaaaattcattttctttttactattcctgttacatgtgtcatgagtcctcttaagttctcttaggataagagtccatttctttcatccactcagtcactcattcatcagtcatttaccgagaattttttatataactgataagctagtgatacagtgaagaaaactaaaatccctgtcttcatggaatttacattctggggtagagacagtcaattaacaaatatatatgtttctttgtcttttcaaataatctaaccacatatataaactcttctaaaatgacactttttcaatcttgccatactcaattccattctggtattaactgataaaaattttaaaatactaaaaaatgcttaaaataactattatttttcagtttacaaaggtggaataacatttcgttttgtgaggtacagcactgagtagctagattaggattcgggtgttcagggttttggtccctacagtagcagtgactagtgagatagccctgagtaagtcagaacccttctgtaccttcattttcccatgtggaaggtttctagagattatccaggtgccttcttaccactgtcaccactttccatgtgcccttgaccctcccatgtcagagtcaggaaagagcctttgaaacaaggcatctaaataaaacagtgctgttctaagactgtattctttgtattttaaatgaagttaaagatattaatagcagcaactaagcagaccatatactgccctcccctttatacttcaaggtagagtatgataacaaggtcagaaaaaaaaattattttttaatacttcctatacaagacaaccagtcactttctgttctcttacatctttcacatatagcctttgccaaattctgtcattctatctaccaaatattccattttttctcctgattatttatttggagacagggtctggctgtgtcgcctaggctactgtctcggctcactgcaacctcgacctcccaggctgaagcaatcctccctcctcccacctcagtcactggagtggctgggagtacaggcgcataccaccatggccagctaacttttgtatttttttttgtagagacgaagttttgtcatgttgcccaggctcctcctcatcatttctactgccactacatccctttgtatatgcttccccatcatctcttatctggaccatcagagaattctttgggtctatttgttttgttttgtttcttttttactttttgctaaaaagacataccagtttatgccactcttcaaaaacttttgctgctttcgagttgctatgggtggggagggggctgtggtggggaaaggaagcttatgctctttgctgtcaacttgtttcatgctctaatccaagtgagcaatccaattttgcctagcaatcttagccgtgttcctctaatgaatacttgcctattctctaacaattctcccaattccttctttctctcaaaagtttttcctttcttcactcttagccagtgacttctccttatactttgagaaaacagaaatcagtgggtggtaattactttcctttcacaaaatttgaaatctattttaattctccctttgactcaaaaatctctctctcaatacacacacacgcgcgcgcatgtgtgtatacatatggatctatcacttttattgaaggcagaggtcttcaaattttggtgacaggactccttttcactcttaaaaatactgtcaaccttggctgggagcagtggctcatgcctataatcccagcactttcagaggccaaggcaggacagcttgagcccagagtttaagacccacctgggacaacacagcaaaactttgtccctacaaaaaattaaaaaattagccaggcatagtggcgtgcactggtggtcccagctactgaggaggctatggcaggaggattgcttgaacccaggaggttgaggctgcagtgagttgtgtctgtgccactgcactctaacataggtaacacagcaagactctatcttgggaaaaaaaaaatggatttccaactgcaaagagcttttatttatatgaattatagctactgatatttactggattagaagttaaaacagaagtttaaaaaatattaattcactttgatatgaaaataaacataacattttaatgggaaaaacccaactacttccaaaaaaaatagtggaaagagtgattttgttttagttttggaaatcttttaaatatctggtgtaatagaaaacatatggattttgatatctagttgtacatttaatctatagccccacacagataaatagttagaaatggagattactcatcttgtcagataattatggatattattctttgatactaaatttgacaagggaatgcacaatatgggtttgaaatcaagtcaaagaacactttgtactttgttatacaaaatctactgtttcctcttcttgcactttttgatcttttttttgttttttttgagacagggtcttactgtgtcacccagactggagtgcagtggtgtgatcatgggtcactgcagccttgacttccccggctccagtgatcctcccacctcagcctccagagtagctgggactacaggtgtgtgccaccacacccggctaatttttgtattttttgtagagatggggtttcaccatgttgcccaggctggtctcgaactcctgagctcaagcgatcctcccacctcggcctccaaagtgctgggattacaggtgtnnnnnnnnnnnnnnnnnnnnagagcgaagaggggccgcgcgtgcggctgacgaggcgcccgcggcccggggcgggcgctcggggcgcgggcgcggcccgcggccctggcgggtcggaggggggggcgcggcgcgggtgccggggcctctccccccgctacgcgttgggggctacccggggcccgggtgcgagggccggcaccggggaccgacgccgcaggttgggaagtgtgggcgggggtggggatgtaggtagagaaaaaggtgatgtgggttaggagttcgactaattccccggcccatgcgggctcacgcctgtaatcccagcactttgcgaggccaaggcgggcagatcacaaggtgaggagagtttgagaccagcctgaccaacatggtgaaaccccatctctactaaaaatacaaaattagctgggcgtggtggtgcgcgcctataatcccagctacccgagaggctgaggcaggagaatcgcttgaacctgggaggcagaggttgcagtgagccaagattgtgccactgcactccagactgggtgacagagtgagactccatctcaaaaaaacaaaaaaacaaacaaaaaaccccactaatctcatcgaggaaagtcttaagaagctgtcaagctcatggtggtaattatcaccaccaacaaatgcctgttgttttccttaaaatgacaagctaacatcattacttctcaagaaaatgtctgtcaaatacctaagtctacataaactgttggtgggtcattctttcaagtaaaaatagtgttccataaaagaaagcaagctagttcagctttcaactcaaacaactgcccaaaagctttccttcaagaaaatcattctctggtgtgcacaagtgctatttcagacttcctattttgtcacacaaatgttaaaaaaacatatactcaagcatcaagatttaataaagttagtaatttttactgcttcataaagaacttcaacaaacttgcctttttcttttttttttttttctttaaacctcaagggtatggtgttgaagaatagaggtagcagtttggtgccactgccttgatttgtgctaaggcacaagcaggttcacaaaccattgcttttgcaccacaagcagaaatttcaaaatgataaaaaggcaaataatggcttagtatgaaaatagttttgacctcttgaaagaatcacctatctctaggatgtcatctttggcctgggtaaccataacaattttctaactactctccctgcattcacccttgcatccaaatccttccctatactgttttctggccgatttttctgggattcattacttgttatttaaaactcttcaaagctgtctaatttttctttgacatctcagttctttaattagcctataacgctgtacataatttagtccctgcctacatcccccaattttttcatctccctttcttctgatttaccaagttccaatcacacctatcatattcatttccttgaaaaacaatttcttcggggtctttgtttacttcagcatttctgttcaaagaatgctctttctctgcgtactcccacatcatgctctttaccaaacacaatttaaacaaattaccccttccaagaaatctccttgaccacccaacccaaagtaggttcccgttagttgttctctgttagagtactctcatttttcccttcgaaggacttcccaggatttgcaaatagttatttgtttatctgtttgtcatttgtgccccaccatggggcacaaacttcataaaaaacagggaatacttacatcttactttatacctagtgggtacactaatacttgttgaatcactggatgcatttctcaaatatttctattaatgagaacatgctaaagtgttcagttatagaatgctgtattaatctgttctcaaaattgaaattctgactactttaatgaataagcagttatactggatcttacatatttttaaaaaaacaaaacaaaagattctctgtggctttcaccttcgtatttaggattcctgaacttaccatgtatggcttcttggtaaccaagtgtctttgccaactttttcaatgcaaaacttttgaggcccattacttcctacaccaagaaaataagacaaagtttatctggtcctttaaacttttttcttctgacaactgcttaaataatagaacatgttgcacagtcatatgaatgatacaaaataaagaaattcacaatgtaagctgcttctgcctgaagaagaaaattgttgcagagatccagcaataagaattagatcattgggaagaaaactctctctacagaatgtcgctcccttcacagtcaccatagggagcaaagcaatggccacctcagctatatgaggacacattcatttttgtcttacaagtgctttgatattagccactcatttttctttcttctaaatgaagccctacctacagcacagaagagtaatctttaggttcaatcaagtctattgtatgtccaaaggccattattatcacaaaattacgtacagagaaattacagtgaaattaca

SEQ ID NO: 94288 - DNA, 22100 bp, Homo sapiens
atagcataaagctgtccctttaaaaataaaattaaaatataaattttagttgtcccgggagttcttttgtatctgaaacctcagttgtcaagcttggaaatctgtacttttaaaatatcctcaagcgattctgattacacatcaggtttggaagcacttggcataaagaacttcccccacccaattcaaagaaatagtatttaagccctcataatgtgcagtgtggttaagctgtgtctttttccagtctagtctacctcaacactcttgtggacatgatttttgccaaaaatctgagtgagctttgggatgcattctacccccatgagatggctattttatcccaggagcaggaaaaaaaaaaatgggagtttacagttatttagtcataaggccggagtcctttaaattggaagggaatgtggtaaacacaacacaagaggagccaacacattctgagtgtgctgatactctgggggagaagagtaagagagtatgacaggcatcagacagcatcacaaaacattttaaagttaaaaacaattaygtaacaccaagaagtcagttttccttacattcactccaggatagatgccttgcttaaaaagtgcctcttcagctaagaaaaactgtgtccataagtacttcagtagctttccacaaacagtaactgtttttgtgttatagaagtaggcttgttctgaagctcagcatgtccttggaatatgattgagtagcatgttagtattcatagttgatggagctgggttagcacttctttaacttcagatatccatatgatgataggaattttctctggtcctgcagtccttcctcttctcagtcacagtgctttctgcctaagtggtactgaatggcattgtgactactgctttcttctccagtgccaggagcggtagactctgcagcagtaaaatactgtctttgttcttttctgagatggtgaagtggctgtgtatggtattaaggcaaaatcacagctaggacaaaaagcaatggaaaaccaagatcagtgtgctgtaaggcaaagtgttagtgagagaatcagaggatgtagagagtgacaactcagtatctgctaatgctccaggttcactgcttcaatcgtattctgcttgtcttcctccataagaaattaagagttaaaacatctttcatttacttctcttggcttcatgttttcaattcatggtactttcatatcacatacctctattgtagattgtcttgatcatgtatactgctaaaggaaggacttgtataatatcgaacagatacttgactaatcagttctctctggctgtttgaatgaaatttcaaaccaagatttctggttagagcaaggtctaatgaactggtcctcagacaatcgagatatttagaatttcagaacaatcacttaagacaggagggatatgttttattgtatcttttggatataaagattacactaacggccaacctgaatgagggaaagggggcagtagggaggcagaatttgagaccccctcatcagagaaaacagcagaaagacatggtaaacttgtttctggttttcctgtggcaaatttgattgggtgtagagagaaggatcgttgagtggggctatgtactcatcatccatgaaggcctacctttctgaacttgaaggtacagtcaggatagagcaaaaggtgtaaacatgtatctgatagtttcagatggttaatttacatctcaagatactgggcagctttgcttatactgtgctgttccttcacctctcctcttcctcttagggtttttcttcccaaactggaattacaattcaggagagagcctgaaatataagatatataatgcagcataagcatggtgtgttgtcatggcatgtcaattttacttgtagattttgggatatttttatatcaaatatgaatatattaagtatgtacttaatgggataaagacacatgaatgggtttttgtatacactttttactgaaataaatgttaatacagaaaagtatgtaaaatcataaatgtagagcttaatgaatgtcacagagaacaagccatgtaactactagttttttttgtggtatcaataagctttccttttattactgtttgtatggtatatctttctattattttgctttcaactttataaatctatttaatatgtgtctcttgtaagctgcatgtagatgagtttatttttctcgagtctggctggcaatctttattttttaattgtagtttttagtctatttgcttttaatataatcattgatatgtttggttctaaatcaaccaccttactatttattttctatttgtctcatctattctatattccctttttttttttttttttaacattgccttgatttggggtattttcccatttcatttttttgtatttgaatttaattatattgttttactgtttgtttgtttaaagattatattagacatccttggtcttttaaaggctattattaatcagttttttttttttaaacaactcctggacagtgaaatgactttagagctcttaaactctatggatcctccttatactttttgatgccagttttgtaatttgttttaatggtaataatactaatatcttgtgagactttcaaaaaatgttttattatagccaatatttatttggatttacttacatacataccctttttatgactctcccttccttcctacatctctgaatttttatctgaaattcttttccttctgcctgaagaattagaaatagaactgttagtgataaattcacttaggttttgtttttctgaacatgtttttaaggctcattcttgaaggacatttttgctggatacagaatgctaggttggtagttctgttcttttagcactttaaaaatagttcactgcagtcttgattctgttgttgctgctaaaaagtcagctgtcaatcttattacacctttgaagtttttttttctgtccttggttttcagtagtttgactgatgtacttaggtaacattttctttttctttgtaatcttcattgggttttgtagatttttaatgtgagggttggtactgtgtcagtttcggaaaatattcagtcattatttctttaaataccacttctcctgagttatgtctcttccctcaaaggttccagttaacacttacattagaccctttcactttattctgtttttttgctcaattctttttcaatccatttgtttttccatacttcattctgcgtattttcttctgacctagctttttaggttattaatttttttcttcagctgtgactattctatgcctaatttcttaatcttgccatttaatttcttgactttattaagaatagttatttctaagctaaaaatatgaaaatcttatttgagtcttttggctctgtttctattgtctacttttttgtgtttagccgtaattttcatcttgatgcctggttgttttggacattgtgtatcaaaattttgtccatgttgtataccaaaaaaaaaaaagtcgtcatgataatttgaggttcttcatgattttatatttctccaggagaatatttttacagttaggctagggcggatcatccagtcagtggctgagatgactctaacgtagacttcagccgttgtaaagattggtctatttttgttttgttcttattctcagattgtagcctttcagagtccttgataagagcataggtgtttttcaggacctcttctcctaagcagactttggacattaatttttgcttagctttattgcccttgctgttttctctttcagaatcagtcattgtcttgaggatagagcagtgccagatgtctggtctgcctctttccttccttcttccagattttggccctactaattctcactgccttgatatcttaccagtgtcttcaaacacatatttatatttttttacattttgttcagtttttctgattgcacttggttgtactaaaagaacctagtcagccattccagaaatacatgaagttgttttgtttttattattgtagtggtgattgttggtttgtacttttgctttcacaaactatttcaaagcaattttgatttttagggttatatttcccagacctctactttcactgcccattgccctctgctgttagtggtgattaggtgaagagtttgagaaatgtaatggaaagggcgtgggtttttttttttttgttttgttttttttgagacagagtcttgctctgtcacccaggctgtaatacagtggcatgatctcggtcctgcagtcctgcctcccaggttctagtgattcttttgcctcagtctcccaggtagctgggattacaggcacgtaccacaacgcctggctaatttttgtatttttagtagagatggggtttcaccatgttggccaggctggtcttgaactcctgacctcaggtgatccacccgccttggcctcccaaagtgctaggattacaggcgtgagccaccacgcccagccgggcatgggctttttaagcacacagacctacattcaaactgtggctccttctgattgtgtcagcctatatgaattaattacctgtttaaaattacctttttaaaatttctctttcctcatctgcagacgggtttagtgagaatgaaaaaggacattgaaattaaattttatttaaaatgaaataatgtatggacagcttctggtatataataaatgcttagtaaacttatttttttaattatcttgaggaataggaaactagagttaagaccaatcttttaaggaatttaatagaagtttataacttcaccatatagtaattgttaacaaaagcttaaaaagggcgtttatgtcaatgtttggttgtggggcagttcaacaggcatctgtgtcccaggtaccctacttaatctcgttaatattatagattccatccaaaatctagatcttgcagtatagagcagaggtcagcaaactttttcttttttttttctgagatagtttcactcttttgcccaggctggagttgagtggtgcagtcttggcacactgcaacctccgccttctgagttcaagtgattctcccaccttattcttaccaattcttcccaagtattcaccttattcttcccaagtagctgtgactgcaggcatatgccaccatgcccagctaattttttaccatgttgtccaggctggtctcaagctcctgacttcaagtgatccacccgccttggcctcccagagtgctgggattacaggcatgagccactgtgcctagccagcaaactttttctataaagggctaggtacggttttgtgagacatattgcctctattgtagctattcactctgctgttttagggcaaaagtagccgcagtcagtatataaatgaatgggcatgggtgtgttcaaataaaactctatttacaaaaacaggtagcaggccaggtttggtccatgggtcctcaaactgtgctgaccctagtcctccacaagctacaagtgtttttttacgtttataaaggattgtttaagaagaagatgcaacagaaaccacatgagacccaaaaagccaaaaatattttatttctagttctttacagaaagggtttgctaacttttgggttggagaaggggtggtggttgctaccagagaaaaagaagtagacttccgtactcagagttaacagcaaagaaagaaaaacaacacgacaggaagccctggatccacaaaggatcctggtgggaagaataggaaattctgtgtgcaatactgacatactcatccataccccaccccaactgtgactgtcctactaattaatctggttttatggattttccataatgtgctgttttagcagcaaatagaggggtaaactcatagataatagctaaatactgttagaaattaactttccrttatagctaaatgttaccagaatttttactccggttatgtatacagctttgattttataacatcctgctaatttttgttcttacagaaatacactttcgggaaatggcctctaaatcctggctgaattttttaaccttcctctgtggatcagcaataggatttcttttatgttctcagctatttagtattttgttgggagaaaaggktgacacccagcctaatgttcttcataatgatcctcatgcaaggcattcagatgataatggacagaatcatctagaaggacaaatgaacttcaatgcagattctagccaacataaaggtatggtttactttattaagcagtaaacataagcagtattttagtctaaattttgtcatattcctgtctgtatctgttaattaaaatgggctatatattccagatattaaaaataattcttggtttgcctcaagagaagggaattgctaaaactcagatttatttagggaataagatattaattttgaattcgtttttaagtagaaatagttcagaacccatgatttggggaagggcataactattcagatttgatttgtttctgaaaatgtttttctaggttcagttttgttatatgtgtgtctttggtttttgttacttgttttggtcatagcttttgcttaagtcttgttttcctagagaaacttgaggtgtatgtaagtttcgatttatatttttataattagttaatakaactaatcttttttttcctcaagaggcacaaagaacaaggaagttaaaaaccaaggatgcgttctaaagacttcattttctcctagcctcctacctctaaccagattttctcagttgagttatttatgtgtcccttaagtgttggttctctccaagtttctgtcctttagctgtttgtctgtgtgacatcattaacccgcataattttaatttccttctatttcttactgtctttagcccagttccagacattgtgaggtgacattaacacaatgcaaaatacggtttgacagaaaataatataagtagcttgaaaacaattggaattctgggatgcagagggtccactattcagttttttctcttctcttctcagtagtaaattatttcttcaccacctctcaagcagaggttgaatggtgagatttcaaagcctggttccattttatcaactagcaaacataaacatactattacaaagtatgtcgtgttttgtgattgtttatgtaacagtaattcagctctgagcaagtgctctgtgttcctacagaacagtttggtcactgtgtatttgctctgtagcatagccacatgtctttaggtgatcaattggaggcagagttccctactaatagtaagccgtacgaggcctcactgcaggcatgtgtattagatacatacttgtccagctcagtggcctacaaaatgtggggtatgctaaaagtttgtctactcccttcagactcagcatgtgtaaattgagtctccttttccttcctactcctagaagttgctcttcctcctctattctttcttttatatggctcattaccatctgtctgtgccagaaattaagaaatcatggtaggtgcttgccttcacatgctagccaattcgatttgtcagtacattctaacagtgctgctactttaccatttttcatctcttttcctctcagtcctcagtgcatttccgattcaggccttcagctatacccatgtacctgcactcaaccaaacttcaccattccttttggtgaacttataacctattttctgtattatgtctttattttttaatcttcctctttgttctacctaggtccctatctactgctctgtaggatttattagccactattttccttcagcacattgaatcctttgttcatacctctataataacatctcttagtatttagcaattattggtttgtgtgtcaggctcaggctccctgaatggactgaattcctctgcagcaggaaatgtgtcttactcatttttttcatctcctatgccagcccatgcccagtacaaagcaattagtgaatgaaaaattatttatcaagttcagcggtggacaaacctgtcttacctgaatgaaacagattggggattcctgcattcactgttctatccattcaaggtttggtatatttgtatagccaagagattgggctcctcaaggatatgagatgtctatgctttctgactgaaagtagggtgattttgtctgctgttgtccttttggattgtgaatcttgatactcagagggacatgagaatttttattttttattttttttgagatggagtctcgctctgtcacccaggctggactgcagtggtgggatctcggctcactgcaacctccgcctcccgggttcaagcaattctcctgccttagcctcccgagtagctgggattacaggcgcccaccactacgcttggctaattttttgtatcttttttagtagagacagggtttcaccatgttggccaggctggtctcgaactcctgacctcgtgatctacccgcctcagcctcccaaagtgctgggattacaggcctgagccactgtgcccagctgggacatgagaatatttttatgttccacccagcttttcccattattccctctcagttggttaactagtatattatatgcctccattgttaatttctcataggactaagcttctgyaacttgctgtttgaccttaattttaagcatatgcttcgtcaggatactgcccagaacattgctactgaaagtcagttcatagactcattctggtcctataactaaagaatgtctgcttatttgggagtaagcagaaacttttattgtaattggagtaattttgtctgaagctaaaaataaaaatttaggacttgttttatattttagttttatttttcttataattcatttttatcctatttacacagtgtagacctcttttagaaataaaaattggcctttcaccacagatagcttgggaagtactcayctagaatctcatcattgagctcttcctctgtaccggtgctactcaaaatgcggtcctggcctgacactttgtmarctgtttgtctgcacaagataatgaggttacactaggatgtaaatcagttttacgctcactgcttacttaaatggacagttttaagtttcagttttaagctcactgcttagttaagtggacattttgattggttggttctgatagtaggcctttttcaaagtaatgtgttgctttctgttctggtataagctccttatttctttgcaaacctgtagtttaaagagcactgctctagaccatcttggaattcccatgtctacsattgttctcttctgtttttgattggtggatttacattttggaatgagktatgtgactatcagaaagtaatctcaactcctgtgctttgaccttttaccacctcagggtacttgtagaaattcttaatagtggattattgtgaacttcaaaaatgaactgccacttcagcagcatgtctttcctgctcttcagaaactcgttcagagcagtgagaaatttctgtcagtaatctattaaaaactggctgctttcttttatgaagtgccaagcagagactatttaaggcagcatttagcatgcctatgaagcaccaggagaacttattaaaatgctgattctgagtcagtaggtctgggcctaagattatgcatttctwacaggctcccaggtgatgctgctgcttttaatcagtaaactacagtttgagacgaatttagattataatgtcaactcttactagctccagtgatgtcctagataacactgacatgaaaccaataaatcagagtgtcagttcacattaggatgagtttgctttcctttggctaaatcactaatagagggataaatagggactttgaaattaggacartgctttcttcagtataatttattaatatttggattttacatctatgtaaataaccttttaaaatgttttgtttaatagatgagaacacagacattgcygaaaacctctatcagaaagttagaattctttgctgggttatgaccggccctcaaaacctagagaaaaaggccaaacacgtcaaagctacttgggcccagcgttgtaacaaagtgttgtttatgagttcagaagaaaataaagacttccctgctgtgggactgaaaaccaaagaaggcagagatcaactatactggaaaacaattaaagcttttcagtatgttcatgaacattatttagaagatgctgattggtttttgaaagcagatgatgacacgtatgtcatactagacaatttgaggtggcttctttcaaaatacgaccctgaagaacccatttactttgggagaagatttaagccttatgtaaagcagggctacatgagtggaggagcaggatatgtactaagcaaagaagccttgaaaagatttgttgatgcatttaaaacagacaagtgtacacatagttcctccattgaagacttagcactggggagatgcatggaaattatgaatgtagaagcaggagattccagagataccawtggaaaagaaacttttcatccctttgtgccagaacaccatttaattaaaggttatctacctagaacgttttggtactggaattacaactattatcctcctgtagaggtaagtttagaaattttattactatgtcartacttggactgactgaattttgttgataaaaacatgttaatatgtgtatgtttctttagtaccaacaacaaggactcttccttagtctttttaaatagagtggcagtataacaaaatagatgagaacagggacatcagcaatcagcagtagtcacttagcaartagctattgatgctgttatatgccaggcactgagaatgtagaagtaaatcacagccaatttccagttctcgtgaaccttacattctggatgaggagatatacagtaaacaggcagacttgtaaatataaaataggattttagtagtaagtgccctgaagaaaaataagccaagtaaggggatggagagtgacccagagtgggatggagtcctctggtttgggtgattaagaaggcctctcaaagaggtgacttttgagcagaaacctgagtgttattagagagcaagttgggtgaagatctgggtaaagagccttctagtcatcaggaggatttaatggaggttcagaaagacctagagtcaaatcctgctctctcacttaatagccgaacaaccttggatggacaggagccttggatgacatctgagcttcagtttcctcatttgtaagatggacataatgtacctgtcttatttagttgttgtaattacaacatagtacagcccttcacacagtaagcatttaataagccttggctcacattcctgagaattttatctaaagtgcattattttaggaagtattccagtagtacaaatatttcagaatatacattgtacttatcccctgtctttaccaaatattaatctttttgccacatttgtttcagttatttaaagaagaaaatgctatagtattgtttttcagatttttaaataaatatctttctacaacttgcccttttcacacaacattgagatttatcaatgttaattacatgtctgctgtgttcactattataagcattgcttcagtgaataactgaatgagaccaggaatcatggaacctagcttttaggctcagttctgttactaataatgcctttaggcaagtcactagttctctatgccttcttttctgtggacctaacgtataaataatacacttcatgctactactgtcatcttcataaggcaatgctttcaaatcatcatctggaacagtgattctcaacccagggcaattttgcccccagaggacatttggcaaggtctggagacatttttggttgttacagctaggaggctgctactggcatctaatgggtagaaacccactacattataaacctactaaatgctaaacatcctaaaatgcacaggacagcctcctacaacaaagaattactctagcccaaaatgtcagtagtaccatggttcagagaccctggcctagaacatctgacccaagctttaggtaatcagctttaaaaggaaacttttgatagtctgtttttctattttagtgagagtactactttggatgcttttttgatgtaaacttttcttaatatattttgaccattccaagatgacttgatcttttttccttaattctgtatccttttcccatataaaaaatttacccaaattcaagaatataaacatgtagcaaatacatccaaatgcatataagatcttactaagagtatctgatgttggatacacatacagtagtagcaaagggacatcataattggcaaatttgttctttctctagaaatttatcaaattatgttgaagaccataaaacagaattagaattcagagtaccaaaattgacccatcaatctgacattgcctgttctccctcaggagattcttacataaacccaacgtgaaactaaaattctattattatccatctatcatttagtaagttttcttccccctaaatgagtttaaatcttatacatactttttttttctatatactaattactgaaaatacagaaaatttttatctagcaagtcagggtaaaagatattctaattcatgaaagagttacattcctaaatttcttgttcagaactgactcttaagcagttcccttcccactccaccttcttagtaatagacttttcaccagagaagttgcagtgagtcttaatatggtagatttaaaatatatgtgtaattgtttacatatatatmtctctctacatgaaaaattgacttttctgtaggtcagaaatggtcaaatatgatctactttattcagttttatttacattattctatctgaaacatattagtacataagtgaggtagagagctcctgatttttttaaattgttaactaattattctactaccattttttaactcattactgatttaaaatgtcccccttatcatacactgtaaccttacttatagtaggatctaaatctgggatttcatttctatgccattgttctcatttgattttggcccagcaccatattgttttgaaccttgtagctttacagcagttttaagttactattctaagggcaaattaactcttctttttttctaagtgttttggcaactcatttctttatctttgcatacaaactcattaatttagggacaataacatctttgcccaggattttttgtaagtcaccttttaggtcctttggtcaagttttataaactatttccataggtatgcaatatttttgttactgttctacttgggcttttaaagacttaactttttactgatatatatgaaaacttatttgtttgattttctttttaagcatctttaaaatctggctttgtaactgaattctctatttctgatgattcttcacttgagattcttgagtttttttgggtaaccataattgtctgctagctcttgttttctaataattatagctttttacttttattgtcttttattgcataaatgcttaacagaatcctggccatccagtaaaatataaataaataagagcaatataattaatgcagtaaatcttatcaaaaatattattttacagaatataaaaattgcttccagaggtcagcaatttataactattactggtctagtccttaagtttaatatgcactggacagtatagtagccactaagtatgtgtggttattgagcacttgaaatgtggctagtccaaattgagatatgctgtaaataaaatacacacctaatttcaagaaaggtttcattaatcatcgcaaaactattgcatgttaaaacagtakgatgaactttttcagttaaataaaatgaaattaatttcacttttttttttttttttttacatttttwatgtggctactatatggcttacatatctgttggacagagctagtttagataatcacaagttgacttatctggttatttttcctatttgcttttattctgatatttcctaaaggtgcaagagtaggttgtctaagaatctacatatccagtgtgtgtttcaaaggaaagtttagagataacagcagagaaaacgcagtggacagtttgataatttttacacactgtaagctacatacttccaaacataaattattagatttattaaatattcagtcaatatgaatcttctcttggaacttgccagactatctccctcattctttacaaagatgtcagatggagcctgaagttttgttggagtcacctggatgacaccaacattctccagataccaattctgactctaggttgactgcttaattcatctctttttctgtcttcttaattttcttgctttcttgttcgttgtattgttgttgttttattttaaactttgttctcataccaaccctattaggaatttatgagaattacataactggacaaaggtttaaatctgacctacctkagggccacytgatatgatttttcagtcaataatagctaacatttattgggcatttattttaagcaaagggtaatttacacacattgtctcctttaaataaccaccttttacaratgtggaaattaaagcttatagagattaaataacttactcaaggtcgtatactagcccacaaaatttgggttcaaacccaagtctaggttgagagctttgtctcaaatactgtactgtttgggttgatacatatatagatgaagtgtattgggttgtagacacctaatgggcaaggctttgtagtcattgaatgccctagaggtatgtttccgagtatgagccacacaaaaaattacagtgagaaaatgaggaagagaaagcagatgttggagaaggagatttctccttgtatagctgctcctttgatttgaagaaatctcagtaattttatccgctaaagagtgtgagagaatattgtttcatttaaaaatactttccacagtttcacttggtttcaccaatttcaattggttttaaatcattaggatgtctaagtaaactattgatttcttccacaggtctagtayattaggttcctctgctttaccttgccatctttaatgtttgtattcttttaaaattagctggtcctttataagtatgtaaatattgtagctagcaatgtgctgtttattaacaatacctgtttccactacttttttagggtcctggttgctgctctgatcttgcagtttcttttcactatgttgattctacaaccatgtatgagttagaatacctcgtttatcatcttcgtccatatggttatttatacagatatcaacctaccttacctgaacgtatactaaaggaaattagtcaagcaaacaaaaatgaagatacaaaagtgaagttaggaaatccttgaaagaaaatcatgaatgaacaaaggtaatatgtctagcactgcactgaaaaaggacttctgcatttctgacatagaacactggaatcccagtgaggaattctaagtgaacattccttatagaaacctttcacatgaatgactataaactgaagctttaaatgagctgtgaagtgtgttaaaatgtgttttgatacagtaatatataaatatrtctatatatatgaggaacttgtgttttttaaatggtggccaggtagaggaactagaaaagagattttgttgcctgttttctgaccatctgtgttattgtcactgagaaactaaaatagwaaatttactaaaactacactgcaccatgwtagtaataaacagatctgccttaaagaaaagaaaattttagaaagaaatattgttgctcagtgttgttaatatagctcaagaattgagtttatatttgcagtatgctataaatgatacccccctaccacacccacacacacagtttttgtctaatgaaaatgttgctgtgattatttataattggtagtatttcttccagaagaagctaaaataagactggcacttaccctgaagtgcattaataaaaccacactttaaaattatcatgggccttgactatattatatacttgattctaattagtcatcttttacgcaatctctgttgtctcttttctaaatgtgtttagccactcttgaataccattctccactattaacattaatttactcaaaccgttcatagcattctgtaaacatgtattttacatatttgttcccaaatttgcccattgttcattatgggtaactaataataaatttaatgctgtttcaggatgcttttcttataacagtgccactctcaggaattactaagtgacattttaaattgatattttaaactctttccaactacatagttatggtttatttcattctcatcctgttgggatgagaacttgtttgtgcctttcataacttgtttaaagcagagttttaaaattagtttataggatctgaggtggctattagttacagtggcaagattatttagaaagcaagattttgatgagaattaaaaacaatagaaaatgtagagtgcttaaacaaaaatgttatattttgaaagagtagatacttaatttataaataacagtctgaaggttgatgctattttgggataattgttttgctaatggataattctaacaaygcagaatacctagtcaagactgtcatcaaaaacattcacaaatgtttcattctatttttagtgactctgtttaaagagtttctgaaaggaaagaaattttttatttttattatctttagcagtactgagtgtcatagcagaatattttacagactttctatgagattatttttatggtacaaagtatttacatttccctcatgtttatcattatgccaattttacatggcagtcatgccactgactctgctatttagctaagtaatttcttttttcggagactgtctcactctgtctcccaggctggactgcagtggtgcgattctcctgcctcagcctcccgagtagcggggattacaggcacgcgctgccacgccccgccagttttcatatttttagtagagacagggttttgccgtgttggccaggctggtcttgaactcctgacctcaggtgatccacccaccttggcatcccaaagtgctgggattacgagcgtgagtcacagcacccggctaagtaatttctatttattgtgccaaaacatgtcaaaatcatgacctctttgaatggtatatttgagaggatgttcatttcattggttaaccatggactactctgtccacgtagtgaaaacatgcaccagtttttacctattatcatggtagtatcatctgccaaaatttcaaggcattcattttattctttgaacaactcttcaccatggtgtggacatgaattttcatatgtgttacttgactagaagtataaatggtttactatagatatccaaaaaccttgagatttgctcataggaaatgaatattgtgatgaatcctgggctctagagtcagacttgcttgggtttaaattcttgctctaacacttactgtttttgtaaccttgagcaattttaatctctctgtgtctcaatttcctcatcttttaattagggatgataatactacctacctcacaggatttttatgaggattaaataaatgtaaggtttttagaacattgatagggagcaataaatagaagattgtattattattctgttaccttggagtgtaagtactgcatttaagtgaatgaaaaatttgctttgaccagatactgaaggaaataagtaatagctagtatttatccaatgccaactgtatgctaggtactgtgcttagataatctgtgtataatagtgttaatcctcaaaatttgggtgttatacccctattatagataaggaaactgaggctcagagacaaagtaactttgtcactgtcacaaagctagtaagtaacagaggtaggatttatattcaaaaccctgtgtgttcattggaaccgtatcaggcttggggctattcatgtagcattatttccatttttatgtatatgatatatgacgtctgatgcattggccagtaatagtcaaattaacccagccaaattgtcacagtgattcttaaactgtggttctcacacttgcccaggatgttgttaaatgcagatctgaagaccccaatctcagaaattcaaatttaagcatggggcccaagagtatgcattcttaccagataccttgggcagtgactgtcaaaagtttggtcccaacaaacagcattaacgtcacctgggaacttgttggaaatgcagcctctctcggggcctcatctcagatcagatctactaaatcagatactctaggggcaggggcaggggcaggggctagcagttgtgtttaagcaaactctgcaggtgtctttcttatcctagtttgagaaccaatacccaacaacctacgtgattttggtgcaagtagtgtttgaaacacactgaagattactgcccwattactaagacatttttcaaaaagcatgttttaaatcagtgtagtccaggatcacactatattaaatataaagataacttaaaggatcattggatcattcattttggccaaatttttagcttctccaaagtgactaacatcagggcctacaataaaatctgtaattctccaagtttagtaattttatattgaggcaggaagggctcattaagtactaataagtacataatttattaaaaacatacataagtgtcatcaaaaaggtccacaattgttagtaaaaaaaattaaattgaagtagtaaatgctgttttataacatacatttttctgctaattcattctgttttgtgtgacctaataaagcaaaagaaaaataaaaaagcaattctccaagtacttcatagagcacataaaaccagatttcatgatgatgatgtattcactatcttttagattaagatctttgttatttggtaaatgatttcagtatggttttaaaacataaggcttttgatgtcttatgttctctaataatggtatgcttgtattttctagtgggaagttcatagataaagcagatttttgtcccagtttgctttcaaatataaatttcagagggctttttcttactgtaatgaggtatgaaaataaatcattgatcagctcttaatattttttgaatacagaattggatttgagcagtaaatttgctaactggttattttcacaattttcttgaatattaatttttcacttctttgagactgtcaaactatagttactaccaggttgatgcactgtacttgaaagaatcccttgattaaattacatctagcattttatttgccatttcaattttcagttcattagactataattctttgacagtttctgcctggtgtttattgcccttctttgtttgctttattactaacttccattttctagttactcttaaatgctgccttcacaaggttaatttggctgttaatagtgattagaatttttatcacttaattgataattttaagcctactaactagggttccctatgaaattgaaagtaaaagtctaagaataatgcctgctggctctcgagatacttgccctacttaaaaatctataatttaaaattaattctatgtctacaattattaaaggaagtaaagttatttgggttcttccactcacccttttctcaaaaacaacaacaaaaaacaaaactcattttatttttctactttatagtaggcctgacagaaacatagtgaagcaatctgggaggcaacctgtggtagattttatgctaaatgttaatgtaacctctgttgattttttaaaaatgtgtttatatataagatttgaaataaaaactttaatacaggctagaataaggaattttacaaattctctttagagcaaccaacattaaagttttagagttgaattttgctctatttcaactcccttacctctctagttttcagtttatattaagttttaataactttgcggggccctgcaaattaataatctacatgaagtatattattagagggaaactaatcttactgctaagcagtgtgttgtactacatagtgaatgttcgtgttttkgaatttaaaaattatttaaggtaatggtgttaygaatggtttaaaaatgtctggtgacttgcttatttttaagtgatcaccattaagtcagaaaaatgtatttttaaatgtttcttgaagtgccttttgaacatttttaaacagcggatttaaataatgcataaaataaattgccatgttcaaagttgtttcatctgattatttttaaccaatataaaagttgtgagataaatgttgtcttttatgggtagtttggggttatttttccaaaagtttaaaattgttttcccatcaaagctatttagtttgaattggctttcataagttttactgcaatatatgtattatttactttaaagcaacaaaatattccacctctgactgagaataatatactgtaaaaaaattagaaacactgtagtctaggtaagtgtgtctagatgggtgggggtggaagaggggagagaatctcatatatttagagagagattgcttctgtgctccttggtatattttgatctatctcatacactgagaaattagtttattcaacaaatacttatgccaggcatctgctagaaatacagtggtgagcaagacatacaggatgtcttaattctagagttagaaaataagctagtagatgaataaacaaagtatttcatagagtggtattaggaaaataaaaatattatcagaacaattttctggatggggtattaaggaagactaggaagtaacatttgagcagagacttgaatgttgaataacagacattttatatacttcagaagttacttttatctatgaaattatttgctccaactatgtgttaaaaaaaaaaaaactttccacccttgcttaatcatgctgtaggtgtaagtgaaggcttactgaaatgtacactataggctaaaaaactttgtgtttttaggcatacttcatccagagctcaggtgtattgatagatttgtctgggagtttcagaatatgaataaaaatagacctagtattttatctctttctgggcaaacagttacaaattccataaggcccttgagtctagcctatatgtcttgatttttcagtaatctgctacccagtatgttattagcatgtgtgtgtgcacacgcaagcatgcatacacactgttatttggattagacagctttagaaaagctgaggagataaataccacttcatactactttagtagtagagttgtataatttaacatattcagacagctaaatattttccaaccagctgtactgataattgttaagtcattggaaagtagatatatttacctaaatatatacaattaaacctattttaagttttccaaaggtatgacttcatagtactggaaagcatacaagaagattcttgctgaatttatctccttgttaaagggaagtactctacagagctcaacatagtggtcgtcttaaagtctaataatgctgacaatatggattgttcaagggaaatttttttagtggttaagaatgaactaacatttaactactaaagttgaatgagttcagcaacattggcattctccagatgcatctgtattagtaaaacagaagtgaactttgttttgccatgagtttattactaattaacgcattttgtattgctgcctagaacttaaaactgtctctgtgttgcatttcttctacaaaatgtgctagtgtttcttgtattattatcaatattgcttttctccaggactgaaaatttgtccagggcattatatactttcttatatattgcccctgtatagtgcaggttaatacaacagcttactttgaaataacaaaatactcatattttaaaaaatgagattcaatcctagaacttaggctctttggcttttctaatgaatgcctagtgaaagattaacagtacttc

SEQ ID NO: 94289 - DNA, 162506 bp, Homo sapiens
  misc_feature (1)...(162506): n = A,T,C or G
tgtgcaatcattgtaataagtacattaaaataaagtaagtcaaagggttgcattagcataaataactcaaggtgagagagttggattgatgaagagtagagaagatgatgccagttgatcacaattgcgaaataataacccatctgtcctctaggcagagactgtcaggggagagagagtgttaattggtagagttccccagtctggtttactgctcattcttcttccagctttgtgtggtgggcatattctagtagttttacatacactcttcctcactgaattacccaagaggtgaggtgttgtttgtttgttttgagacagagtctcactctgtcacccaggctgcagtgcagggcacgatcttggctcactgcaacctccatctcctgggttcaagcgattctcctgcctcagcctcctgagtagctgggactacaggtgcgtgccaccacgcccagctaattttttgtatttttagtagagacggggtttcacagtgttagccaggatggtctcgatctccggacttcatgatccgaccgcctcagcctcccaaagtgctgggattacaggtgtgagccactgtgcccggcctgagatggatattattatcatccccatggataccaaggtgttatcatcccaatgttttaaatgaggaaactgagacacagagagtttgaatcacttcattactagcagtgtagcctcggtcaagttatttaacctctctctatgttagtttcctcctcttaaggagtactaatactgtctgttttggtgagttttcaagaagattcaaaggacacagagcatgggccacttgggtgctgggcatatgatggttattttttatgggtctgcctggagacctcccaagattggttttgtgaagggaagggatcctgggtttggctttctggatcttgagtctccacagaaaggacagaaaagccaaaatctgtttgccccttggcagtcagatgaagagttagggggaacatgaagtgatatgtcatgtccatccttggatggctggataaagaaaatgtggcatatacacacaatggatgttagcttcaaaaagaagaaaatcctgcaacatacagcaacatggatgaactctgaggacattatgctaactgaaagaaaccagtcacagaaggacagatagtacacgtgtttattctgcttctatcagctatcgaaaatagtccgaatcctagaaccagagagtgaagtagtagttgccaggagttgggggattggggaggagcatggggagttgctgatggacaggcataacatctcaatcatgcatgcacaatgaagaagccatagagacctgctgtgcagtactatagccaacaatatagtagtacatgcaacaatatacaacaatttgctgtatgttgcatatagtactatagtgttgactatagctgcatagtcaacaataatacacacttaaaaattggttcagagggtagatctcatgttaagtgttattatcatagtagtcccagcacttttggaggttgatgtgggtggatcacctgaggtcaggagttcgagaccagcctggccaacatggtgaaaacccgtctctactaaaaatacaaaaattagccgggcgtggtagcacacrcctgtaatcccagctactcaggaggctgaggcaggagaatcacttgaacctgggaggcggaggttacagtgagccaagatggcgccgttgcactccagcctaggtgacaagagtgaaactccatctcaaaaaagaaaagaaaagaaaaaaatgaattgaaggggggaagccagagagaacgccgcagtcactatagaaaatgacagtgactctgagggacagaaattctcaggcctccaattctcgctgactgcgcctctctctgacttttctggaagcgatctagtatctgtgagcccttttgttccagaagacaaaatattttccttccctcttatactcaaatcttttgggttcccatggcagctgagtagcatctggggccaggcagaagttcacagggccaccacaagctaatcatcgccattgtggtggcctgtcttgagtagagagcgggtattaatcatgagtcccatcagaatcaatggtggtgcctcttcctgatattacacattagccagaggaattggccattctctgattgtcagattagcttcattggccgtggggggtggagggagatgatcgcagtgttttctgtctggttttgcttggcaaagttcagccagaaagtgatggagaacaggagcttttgaaatgggggtttgtggaggttttctgttgtgtggcggggaaacttgctgataacaaggaaagagaagggccccagaatgacacttaggatatgtctgaagagagaaaacgaagatgtccatcagggcagtagctcttctggcttactccctgccctttagacatttctagaaacttctagaaaatgggcttagggacagaatttaaatttatgttcttggagcatgggagtcgtcaatagatgtttctgtctgttggagggagaaaaaaattggctcctgtacctgactcagctcaaaggaagaaaggagatcaggttagctcctggattaatcgggatgagttagaccatgctacagtaacacagatcccccaaatctcagtgactcaaagcagcaggggtcaatttctgcacactgagggttggtagagtctctactccacatgggcctcactcagggatgcatgacctccaccagcaggagtgtggctggatattgtggtatccagggaatgacaccttatgggttccagtcactgctcttggccatagcatgtttcctgtctgtgcctaatatacaagggatagggacatacaatcctaacacatccctagaaggaatggaacagaaatgatttttcatagctttattgaatgccacccctgccccatcagctccatcccgacagacgctaatatgagcaaagatggtgatacccattattccactgcaggggaactgaatgcttcttgatttacttctcagcaaaacacaagaggcgtgatacaatagcagattttagaatcaggcagatgcaagttcgctgcctccccaacatgaatttgtgcaaattactcgacatccccaaccttattttccacccttttctgtaaggtgggcgaacagtagtgcctacgttggaaattatttccaggagttaagtgaggtactgcatccaagggcttagcatggcacctagcacgtgatccatagtgaagaatgtatcacaacaagcgttggctcctcgttctataaaatggcaagataaatacatccaattgtcagtaccctataagtaatacctgtgaataacttactgtggtgcctggctcatggtaagagctcagaaaatgcgcctgagaggctgcttgggactcttcaagggcctctggatagaaaaaaagggaaaagaggaacatcagcaggttttgtttaggttacaagaataaagatgtactctaggtaccaactgaaggggattttttttgtaggtatctgtggagaataagaaagaccagaagcagaaggccctcatttataggtcaggatataaaagcagttcctgtgtacaaccagtagccgccctgtgacccaatatggactggtcagctgtttttttcttggttctttttccttcttcctaccttgttacctcccagctcctgcagcctcaaactccacgtgcttcgtggctgctgcttactgtctctatatgacttcctgcaacacaataggccactagccagcctgaagattgcaatttggaggtcacacacctctagcagattcatttagctgggtgggaggggccagatcttgtggttcagtgtcagcttgcagtacttaagggttttgggtgatgggtgtaataaggatcatacaatttcttggaagtggatcatgtccctggtagcccagagtgtggggtctgtgatctgcctggtttgaattccagcttcaccgccaactagctgggtgaccctgggcaagtcacttgttcatgggtgcttagtttcccatctgcaaaatgaaagtcatagcagtactcagcttacagaatggccacaaggtgtcttagtgtcagagcctccaacaaataggagaaattcgtgcttactgctaggagcaatggagcagaggctagaggagcatctttttttttttttttttttttgagagccagtttcactctccccccaggctggaatacattggtgcaatctcagctcactgcaacctccgcctcccaggttcaagcaattctcctgcctcagatttctgagttagctgagactacaggtgtgcaccaccacccctagctattttttgtgtgtgtgtgttattggtagagatggggttttgccatgttgaccaggctggtctcaaactcctcacctcaagtgattcacctgcctcggcctcccaaagtactgggattacaggtgtgagccaccacgcccagtcctaggggcaccttcttctccaggccatcactaagtcgtatatggatggtgaggacagaagcaactaacccagtcccagaggaggaggccttttaactcacactccagcagagcaggggtctgcatacattttcttaaagggctggatagaaatattttaagcttttcagaccagaaagtttctattgcaactattcactctgctattgtatcaggaaagcagccatggacaatacacaaatggacaggtatggctgtgtttcaataaaactttatttataaaaaacacaggcagttgtttgctgacctgctggggtgggagccttgctgagggtcagctgctcttgggtacccctgcagatccgctgttcaggccccgacacctttttccttgggaactggtaagaggcatatttcagccctccttaaaaggaggactagcagggatgccgcccattgcccctgtgtttccgtagcaacaagggcagctatatggagccattactcttctctgtggcttcagaggtcaggggccgtgttgtaggacactggatatgctttcagattaaggccttgggaatgagctttaagcagaagcaacatgttgcagaaacaatttggggcattggttgaatgatgcatttgatcattcgactgatcaaagtaaccaggacccatttacccatggaggagctgagtttggggtccagcccttctggaaacatccatgccatgcgtggtctccagaatgactcctgatctttgtcttgaccccaaatgacttcatcacttctgttccatgtacacacatgaagagccaaactcaagcacaagagtgtcgcaagtttgctttgctccaggacttagtgtaaagtttattctacaagggctgcattcctcttaaaaaaaaaaaaaaaaaattgcggctggtttctttcccacagaatttacaacggctcagtctgatttctcttatgggcatagatatatgagcatgtcctaaaggcaatggaatgtatgtaatatcctaccaatatttttccctttataactttattatatcatttccagcccttaagtaaaccatcacagcactttcagctggaatttaaacgggacgctggaacaaaatgtttgttacccagtggcaaagacagtcaaggaaagaaactgacttgaaaaggtgtggttaataagaagcattgagaatcgtagtcatggcactttagagcttgaaaaagccttggtttctggttggaacatctcctatttccagatggggaaactgaggtccagagagagccatcttaccagaggttaaaccagtagcaaaagtaggatgtgaaactatggccccggcttccaagtccgtatgactcactcttcaaaggccagtctgcttagcatgatctctcagtcaagtttctcttctgtttctctcccctcttctccaggatggctacttttctcatcggccgaaagagaaagtgcgaacagacagcaacaacgagaactctgtccccaaagactttgagaatgtcgacaacagcaacttcgcacccaggactcaaaagcagaagcaccagcctgagttggcgaagaagccaccgagtagacagaaggagcttttgaaaaggaagctggaacagcaggagaarggaaaaggacatacattccctgggaaaggccccggtgaggtgctgcctccyggggacagagscgcagccaacagcagccacgggaaggatgtgtccagaccgcctcatgccaggaaaactgggggcagctcccccgagaccaagtatgaccagccccctaagtgtgacatctcaggcaaggaggccatctctgccctgtcccgtgctaagtccaagcactgccgccaggagattggggagacttactgccgccacaagttagggctgctgatgcctgagaaggtgactcggttctgccccctcgagggtaagttccaaccccgctggctcagagasggatctcctggccacttcctcctcctgcccagccccattctgctcaccttctcagaccttctgagaaaggccaccctgttttccaaaccccagatgagcacacgagatctgatgtgttctagtactccctgagtgttgaagtcttgtatcagaaaaattttgcaaaatcagattaccttttgtaggtgctttaacccattgcctttatggcaaaggatgaaattatagtgaaatcgggagctgatgtgatgctggcaggagccaagggagctgtattgatatggtttcgtttctctttcagtagaatattgggattagaattgatatgaatattattgtaattgattatgatttgagaggtttctaattggttgcattaacttcagaggctctgtaactttccgttttccttcatcaaaagtttctttccctcttctcttctctttcttcctcatatgtttcctgtttccctccttctttccttctcattcctttattttctttctccctttttcctccctttcttcctcattttcttcctggtttgtttctccctttccttttcttccctcttctcattcccttccttattttcctctcttcccccttccttctttcctatttcctttcttccttattttaattttctttctctctcctttcctcttttcttcctattttctttcttcccttctacattccttcctgctttctgtcctcttctttcctaatttttctctcctccctccctcctttcttcttttccttccttcattctttacttccttccttccttccttctttccacctttccttgctctttgcttttcccctccctctttcccttcactggcactcttttatgtgcggatgacctgatgataaaccagctctcttgctgagacacggagggatccaagctctgatccagaaattcacaggcagagtggaggggccatctgaagatggggagtccagtttcactagcgcatgtgcaatcgtgccattgatgtgtatttcttggtagtgattttcaccttctctagtgcccttggaaggggaatgacagcagccacagggggctgctgaggcttcgctgtgtgctagacaccgcaccaggctctgtgcagtcaatttgtttatcacatccaacactctctgaggctgatgctgatgtcatgagcccaatttttttcagatgagagatgtaaaatccctctcccaaggtcacatggcctttaagtgatcttacaagcttactgttatggcaggaaatttcggacccactcagagtagagagaaccccaatgtaccatcacccagccacgtggtcgctggttattgactcgtggtcactgttgtttagggcacgcccccttccctcccgctagcccctgccaccatagcttacgataatccagcctctgggagcactcttaaattttacttttttccttggagaagatattctcaaaatgtttgtgaattcgtttgctcagtggttttctctgtggagagggcggatagcatccaaaaggcaccttcccacgaagagttggtgccactagcaacaaacagagaggaatgcatttgaaataaacgggtgtggatttcattcaagctcagctaccagctaacagggagagtcctttctgctctcagggcctagatttcttatctgtccagggagcagcttgcattctaggggtctttttgctccaccttccctgggagcctacttcactctttactcctggccatccctccttctcattgggccacactgcaaggccagcccagctgtccctcacaaagtggccaaaggttcacagtacccccttgtcgcttctaaatccaaataccaacccctgcttttgttatctccgaagggaaaagacccttaaatgagcacggaggccagcaaggaggcaacagagagctctgggggctccgatggggttgggggcatgtcagagtcgagctagatggagattggggaggtgtcagggtcaacagatgcagctggaagggatccactgaggtgctgctcaatgtcaaggcataaagtcagagaatcaagccagctgcagaattggggaggaagggytttccgttccaccggcatcggtgcatccgggagccatgcaaggctttgcctggtgtcctcctgagaaggcaaatggtcaattcacccaactctcttgatgaagaaaggaagtgcagcaagagaatggctccccagaaaagtagactaaaaagacctcttaagagaactcttcattcgctactctttttttttttttttttttcgagacggagtctcactctgtcatcatgctggagtgcagtggcatgatctcggctcactgcaacctccacctcccaggttcaagcagttccctgcctcagcctcccgagtaactgggattacaggcgcccgccatcacacccagctaatttttgtatttttagtagagacagggtttcaccatcttggccaggctggtcttgaactcctgacctagtgatccacccgcctcggccccccaaagtgctgggattacaggggtgagccaccgcgcctggtgagaactcttcattcgattccctggacagataagaacatgaggctcatagaggggaggagacttatgccaggtcccccagttaattagaggtgtttttcattttaaatatgtgcctctgtgtttaccactggtcacagaatagaggatttagatcaaataggaggtggccacctacactcattgcacagaaagagggctggatggatagacagcaaaccttccttatggcccccccatctgcagggacagggtggcagcagggacaactttaacaagtgcatctatattattttagtttctagtagcaagcatgtgtctgtgcaatacttttgttttctatctgttttgttttgttttgtttttttgagacagtctcgctctgtcgcccaggctggagtgcagtggtgccatcttagatcactgcaaccttcaactcttaggttcaagtgattctcctgccttagcctcccgagtagctgagattacaggtgcctgccacctctcctggataatttttgtatttttagtagaggtggggtttcaccatgttggccccgttggtctcaaactcctgacctcaaatgatccacacacctcggcctcccaaagtgctgggattacaggcatgagccacagtgcctggcctacacgatacttttaaatagaaagatttagaaagaaaagcttcctttctgccttgctgtttcacccttgtctaagtggtcgaggtggttcctgtctatattcttgattagatttggcacacagagtgtagcaataattaagtggagtgcaacgtttccagcatcttttgttaacctgtgcctggtggagaagttttggaggcctgagttgaatgccattccatgaacgaaatattgagctccttctgtatatcagagacagcacatttgttctgtgaagggccagatcttaggcatttgaggatttgggggccagtctttgtcacagctattcaagtctgccatccgtcatagggcagaagcagccagagaccacacatacacaaatgcgctatgttcccattaaacctaacttataaaaataggctggctgggtgtggtggttcatgcctgtaatcccagcactttgggagactgaggtaggcagatcatttgagatcaggagttcgagaccagcctggccaacatggcgaaacctcatctctactaaaaatacaaaaaaattagctgggcatggtggtgtgcacctgtaatcccagctactctagaggctgaggcaggagaattgcttgaacccaaggggcagaggttgcagtgagctgagatcatgccactgccctccagcctgggcaacagagcaagactccatctcaaaaaaaaaaaaaaaaaagaaaaagaaaaaaaggaaaaagaaagaataggccatgggccggatttggcccttgggcttttagttttcttaaccctgcaaaatgctatcactgtctatagttgacccttgaagaattctggggttaggggtgccaacctccttgcagtcaaaaaatagagcacaacttttgactccctgaaaaccttaactgataatagcctgtgttgactgaaagcttactggtaacataaacagttgataaacacatattttatatgttacttccattatttactgtattcttataataaagtaagctaggccaggcacggtggctcatgcctgtaatcccagcactttgggaggccgaggcaggtggatcacccgaggtcatcagttcaagaccagcctgggccacatggtaaaaccctgtctctactgaaaatacaaaacttagctgggtgtggtggcgcatgcctgtaatcccagctactcgggaggctgaggcaggagaatcgcttaagcttgggaggtggaggctgcagtgagctgagattgtgccattgcactccagcctaggcaacagggcgggactctgtcaamaaaaaattgtaaataaataaataaatgtaagtaagctagagaaaagaagttaagaaaatcataaggaggagaaagtatatttactgttcattaagtggaagtggatcatcataaaggccttcatccttgtctttatgttgagttgaggaaaaggaggagaagaaggaggagaggttggtattactgctgtctcagggatggcaggagggaagaaaatctgtttataaatggacccgtgtggttcaaacctgtgctgttcaagggtcacctgtgctaatatgtgcaacactgccttgtcacactgtgtccccacaccagccctacaggctgagtctattgtgaaccctttttgtcagtgaggaaatcgaggctcaaggaaggggagtccttggccagaaacacatggccagcagatgacagagctggtactggaactcatgttacagagcctgtatccctttccataagcctgtccctcttggggaggcagaagggtcactttatctcacattgtcaagccccagaggtgttcttccacctgcaggctcgytctctctctctctctctctctctctctctctctctctcaagttgcaagggagaagaaggcagggcattattgggaarccaggggtgctgatgctgtcagtgcttaagagcctggggtggtggaggcagaccacgtggatctgaatcccaggtgtcccgtgcacaagctgtaggactttgggcaagttgcttgacctctctgtgcctcagtttctccatctgtaaaggggagatgagcatcatcacacttagcttagagggtttccaagggcctagtacacagctaagaactgtacctggtagtgctaatgtacattgcatccctatttgctttatgactgctccacagttgttcaaaaaaatcagaacctcagcatcttaggccaggggttcctgcacttctcctggtcatgctgaggttatctccggatggctttgcagtgtgagtttgccggagtttgtcctgaggcctttagtgcactggccaggatagcgcaccctcccaggacctgtgagctggttaataagattggcatttaaaagccattgcacacccagcctcagcgacgctttaatttgctacaccacagactcccccatttgcaataaatttactgtgaatagactaattgcaaaataaccctaattgggtagttatcaatgaacaacttcccatggaacaaaacggcttacaattaatagcatttaagccataaactattcttctgcagaaagctaagatgtaattacaccccatacggggattgtgttccctttctggaaaccatgacacccagatttccctctgcttaggagggatttgagcttcagcccagtggtccttttatttctttgctaaatgaggagatggagacaggggtggagggaaatttaatatatgagtaaatattcatatacatatragcatacacacagatggatgccctgtgtttctcattttgctttacgcaacatcacctaaacttcagccaagagtgtgctggaagttgaatataattaaggaaacaattcctcatggctgcaagtctgaaaaattcaggggaagagaaatagattttaaatgttgactttggtacagcgcccccactcctcctgtccctcacgctctctgtcccctcaccccaccaccactcagggaaaatgtcgagtccagaagcccaggagatggtttgctttctgtgagacattccttgctctygggacttttctcctttactttccagagaaaagggatttagaaggaagccccagctccatcccttttcggtracagctgttttcacgaggggaagagggattcctctggctgtccactggcaaccgtgcagagggagatgcagtgaggtgtggggaagggactctgctgcatcacccccagtgatggcctccgagaaatttgttttgagccacacaccctagggtctctggtcattcaactggaacccctagtgtttcagggcaaygaaccaggtcagattgaaagtcaaggacagcttgggcaatggggtttaattcctggctctgccgttactcatgacataaccctaaccgctcagtgactcagtctgcacagtaaaatggacacaaaaactcatcttctgtctttatagcgtggttggctgaaatgagacaatgcatataaaatgctgagtgcactggggaagttaagtggatgtgcttggcttgttagtattaccacaatgacttttttttttctgcaattacttttgcaccaacctaatcgtcgcaatggaggagttgtctaaatgaaggggcgacaagaagaggaaaggagaggagaggaaaagggtttctttgatggtgtcagccattgtgcagccacgtcttgctgggtctgctcttcagacacagccccagtagcttccagtcctccccagccccctccctgtccccacaactcccactcaccccactttggctgttacctcttgcctctggagatcccaccctgaatgcgcttcctctgggaagccttccaggaccacctcttccccagaagccctggttgcagggaacacatggatcctgggtgaagggtgcatctctgcccctttcattgtcaaagcatcttttccaataaaggctgtttcacctgcgacccataggaggcaatctgtgccagctgccaggtgacacagctttttctgcctcattacattttgaacacctgcatgtcaggaagcgccctcygtgcagtggccctcacggccaccagcctctctgtgtcttgagttaaaatgtcccaagaaaggccctgctggctccttgcgttgctcctgcatttcttcccctttgctgggtctggttaagccaccacatagatgctgtaagtgacctgtgggtctgcagtctagacatccaggtgaagaattagaaatgaaaaatgtgagaagttccagggaagatgattggctgggagctgggtgggttggacttgagtggggaaccccggtctgggcatctgagtgaagtcggcagttctccaatgggtgatgggcaaaggaaattgcgcatgactggggaagctggcacaggtgttaggggtgaggatgaacagaagggggttctttgtggcagcaacaaaccgtctttacccatcagcctttgcaggaatggatttttggatatggggattctggggggaaggctggccgctcgctgcagagagagactggcagatgatactgccagctgcttaagggcagtctcttctacatccctcctgccctgggggcagtggggtaactacacagcgtgagtagccggcttctagaaagcrtagctgacagccgcagtggagggaaaatagaactggggatgtcacaagtggtcccaggtaaatacctcagtttccccatttgtcagccagagatactactttctcccagatcctttgctgtatcaccaatgatgagaaaatgagggaatagctgtgaaaagttaaaaggtaccacgctaatgagggtgatgtgatgaagccacattgaccaggaacagcttggctaagtgggtggggttgacgggctttcccaaggcggcccttgcagttccaactgggccctttggcatctccttctgaggagcccaggaaggaagaggtatccagtaacagttcattggagttggacaaaactagtcccaaaggtcttccttgggcttgctggggaaaggcaagagactggcaaatccagagaacaycagaagacccattcattggtcagccaccacattcaaggctgtgctccaggacagggcctcacacacacagtttctataaagggccagatcataaatatttgggactttgtaaaatgcatggtctctgtctcagctattcaactttaccattgtagcgtgaaagctgccataaacaacacatcaacaaatgaccattgtgggcatgcttcagttcaagtcatttatggtcaccgaaatgtgagtttcacataattttcacttgttgtgaaatgctgttctacttctgatttgttttctacccacttaagatgtcaacccattcttagctcaagggccatgccaaaatagatagttacaggctgtggtttgccaatccttgttctaggacctggagttagagctgtgaacaagagcagagaacaccttgtgccacttgagtaccatgtccattggttctggaaatcaattgggcgtctagatggctgtaccctcatggagcttctacctgaataggagagaccagaggtgacaagtgaatagccacatctgcaatctaatgtctggatatgactctatgatttatttgaagacgttgagcaggatgagaggacaggtgaggtggggaaccatttagataggtgcctacaggctgtgtgtggtggctcacgcctgtgatctcagcactttgggaggccaaggtgggtgcattgcttgatgccaggagtttgagaccagcctggccaccatggagaaacaccatctctactaaaacaaaacaaaacaaaagttagccaggtgtggtggcacatgtctgtaatcccggctactcaagaggctgaggcatgagaattgcttcaacccgggaggtcraggttgcagtgagctgagatcacaccactgcactccaacctgggtggcacagcaagactttatctcaaaacaaacaaacaaacaaacaaacaaaaaaactacataggtgcctagagaaggaacagaaatagatttggtctcattgtggaagaacttgctaagaattaagctgcttgcaaatggaacagttcctagtctttggatatgctgaattcctttattcatttaatatttattgagaggctgctttgtgcctgacattggtttagatggtggggaaagacwtgccaggggcctgatcgtactcatctttgaatatctcgtgcttggcacatcataatcctcagtcttgccctcactgggaaagaagataacgtggttgcttttagcctcagtggctcaacctcccttcacactggggtctctacagaggcctgtgtgcaccaagcaaagcaatggaaatgggcatctagaatctctgtggaggtggtattctgagcatggcatccaccacctgggacctgaaactgtttgtcaccagctcccttcaatataccctcattcaacaattagtcatcgagcatcccctgtctatgccaggaactagtttggatggattcatttgggaggaaagcagatagaatccccgtcctcagggagcttgtggcctgttaaagttgggtagggaaacacaggggtaaacgatcattaaaatgtgcacgtaggccaggtgcggtggctcatgcctgtaataacagcactttgggaggcaggtggatcgcttgaggtcaggagtttgataccagcctagccaacatagtgaaaccccatctctcctaaaaatacaaaaattacctgggtgccagctactcaggaggctaaggcatgagaattgctttagcccgggaggaggaggttgcagtgagctgagattgcaccattgcactccagcctggatgacagagcgagactccatctcaaaaaaaaaaaaaaaaaaaattcacatgtaaaattgcaacagcaattctggggagwtgcatagttgtgttttatagttgagctaagagatgaagggtggtgaaagttaactagargaaaagctggagggggacattccaggtcaagggagtatcgtgtgcaaaggccctcgggtaggcagaggtgttgatagtttaaaacactcacaagaccaacaggggagctcttcctataarcaaaaaggttaatctgctcgtaggccaagttgtaattcctaaaagtgctaggtttagaggatctgtgtctttgctttgagcaaggagaatggaggtagaggcatctctcagtactgaactgaaattgccagagacctgaggggaaggtaggcccccctgtattagtctgttctcatgctgctgataaagacttacttgagactgggtaatttataaagaaaaataggtttaatggactcacagttccatgtggccgaggaggcctcaaaatcatggcggaaggcaaaagacatcttatagtgtggcaggcaagagaaagagcttgtgcagggagattcctctttataaaaccatctgatctcatgagacttattcactatcacgagaacagcaagggaaaaactcacccccatgattcagttacctcccaccaggttcctcccatgacacatgggaattatgggagctacaatttaagatttgggtggggacacagccaaactgtatcagccccaaaggtaagggtctggcaggctgggactggggggcaggtctcacatcctctctctacagaatcatgcttcttccacttttgagccctgaacaagaggtcatcttggatcaggaaagcaacccctgcccccaagttcttagccctggatttagggtacacatctttgggaggtctttcctcctcttacagtgctgtttctcatgacatccaagccatggaaggaaatcctcagtgcctccagcaatgtcatagactcagtgtcctgggctgtttcactatcattgacctgaccctggattaggagaagcctttgaaccaaactcaaaagacttgcggcccctctgccactttatcggctgcgaaagccttgaacaaggcacttgtgttctctgagcctcacgtctttcctataaaacagattgcacaagggcctcccctgcctcctcaggttgctgaataaaataccgtatttgagtgtactttcattaatccatcggtctagccagcaaatatttaccaagcacctgttacaagtcagccataggccacctctcgattggcagctcttgtggttctggaagcctgcaggtgggcatgggagactcgcttccatggcagggtggtttgtgatgattttcttggcgttccatgagttcttgcccagtagctgccccagaacaaggcagagaatggagattcgaagagcacatagaattcttgctccatgagaggcttgctcccttgggcacaactgattgtgtgtctgccacccagggtccccaagacagagacttagtgcaagaaggaaggagcccagacatggcccttgaatgaatgaatgagtgaatgagtgartgaatraatgaatgaatgaatgaaataagccctagagtgaaaagactagctatctctcctttctgcataagtcaacaaaactagctggccttttctcctctctcaaattacttggcagtccagggctaggaattcatatcaatgccacttcctcctggaagccttctgtgatgctgtctccccacactgcacctctccaagtctgtgtgaggtgctcaagctgtgtgcccccaaaccaccttgcctgttccctgctggggtacatgtcacaggatagcgtggttgctggagtgctctgtagcccacactgagccacaagggctgagtacccttaattctgttggggacccttaggtgagactggctgctatagcatatcctgagtctccaccactggatctccagcccctgcctgcacggggctaggacacgagaacccacatttcttaggcacttcctgaatgccaggtgtggaggcgagcactttgcatgtgtgatctcatcgcgactcctgcacagccctggagaagggatgttctctagttccattgaacagacgaagaaactgatcctcagagaggttaagtagcttgcccagggtcacatttgcaagtgacagaccttagactcaaacccacttctgcctaacttcaaaacccacaccttaacttgtctgctctgtggtacccttagtaaatgtggaaccagatgtgttaaatgactgatctagcttctccagagataaaggaaaatgcactgcatgttaatcaacacctttctctagctattgatacttgttactctccatctctgcagccagaaagaacagggagctaaggtctctatacaagaaactgctcttaaataataacacttaacctctacgtagggattgttaaatgccaagggctatcctaagaaggtttagccacattaactcatttattcctcataacaactttgtattcaaagaagttgagacacagaaaacttacccagaattacacatttcaccagtagcagagccaggctctgagctcagagactttggttccagtggcgtggcaaggggcttaaccactrcactttggtgtctataggagcagctgcattcaggctgaagcaagccctttgcagcttacatttgctccttgtgctcaatctgtctgttgcaatgagacccacccacrcagtcagataattcacctgcttttggaggcgggggcgccaatcccatccaagacgctaaggacttgtgtttgaagtcagttcattgcctggggtgagaaatagccagccgcggttacctcccatttctctgccagtttctagttgctgtggtatatttgtgttagtgtaaaaatgacaaagcaataatttttcattgtatccttcagtcacccatgagagattggatttaggtcacaatttattaccccgtggaattgaattcaatttttaacaccatgtcagtcattctggtgttagagccttttaatggctgtgaaatttatacartgataaagtaatttaaaacatatgtaggaagaacatcagacaaattgatgtgtatagaaccctctggtaaaaattgaacaggagataaacacggaaaatggtgattgattaagagacgattgaaatagtgcttgctttgataaactcttaatggcgaaattagtaaactaatttattcttcgcaattttgaggagggtttatgttgccctaaatcagaatcgagctgagccacaaagcgcaaattaatagctcacctccaagtgtggcatggatagagtgagaaacctttcagaggaastgggaggctgccaagagccagtccccggtgatatttgcagcgaccaaagbgaaaagatggtgagaaggcagggaaagragaattctcctcacgatttttaataacttgcccaaataatgcagaaaggatgcttgttaaaatctaattcctcaagtcaaggctgtatacattctcattattttaaaatactgaaacattgcagataaggggaaaatccaccctgatccgtcagtcccatctgagcagtggcacttgtgtgtacatttttgtttttctttagatatctaaactcaacacatgtcaaaaaaaagagtgtggttttgtgacaagagattcataaatcatatgaaactgatgtataaatctgaaacttgtaaaaaatatattaatagtatctggctgtgggatgaaagaattcacaagttagatgatttttttgttgttgttgcacatgtccaggtctgaggtctgtttccttgcctggagctagagacctaagttatttctttatagtagctgaccatataactctgggtatggatacaccacagtgtaattggtcattcccctattgagggacatttaggttgttgccagttttttactatactaagtgactgttttctcagatctctcaaagatgtacataactagtaccattctggatacatcagagaaaagctaatttgctacctacaayggatgccccaggacattcgagcttaattctcttggggatcctgagttgagactggctgctacagagcatctgaagaatagaattggcaggtcaaacagcttgcccattttaaattgtgatagacagcatcaaactgccctgtgaaaagcctgtattggttataacagtatatcctgtattggtcaccaacaggaccttgacagcctctaaaacatcctcatcttccatcctgcattctgcctgggatccctcttcaggtttcacgttagtaacatctctcgtgcctagtcctccgagatcccagcaattttcttgcgtggtcaaggacagtgcttgccggccacacttgggcttgtgttggcaacagaccccccaaggccccacccccagggattctgacccaggtcgaggacagaacctgagaaatcacacttctgccagaggctgctgccctccagaactacactttgagaagcccggacctgggagaacatcctgttccccctagttctgccctttccctgattcagtggtttgcaaccaatgctactgagcccctcgggacgtctggacatgcctagagacatttggttgtctcgactgggaaagggggtactactggcatctaaagcgtagacacgaaggatactgctcagcatcctgcaatgcacaggacatccccacaatgattttccagtccaaaatgtccatggtgccgtggccaagcatggtgggagacctgggcatctgcttctctccatggggcaagttcacattyggtatggacacattggcatccacagtctcactcctgggtgtgaaaagcctccccctcacccctctgactttctcagcccttgatgaccctttgcgtcctgaagacccctctccccagcctgaagagtccataatgagacacctcacattgattgctgaccgttgccgctccttgtgctaagcacatagaactgtgcttagcagtgaaagcttgagtcggtcggcttgggtttgaattttagctgtgcccctccctcactcgggaccttgtgcaagggacttcactgctctgttgcttgatctttaatctatagaatggggatgatgattggtatctggtttgcccaggacaatcccgatctgtgcctgtcatcctggtatagttagtaatggagcccctttttcctctcaagagttctccagtctcactctaacctgatgaggattctcctatagagtgagactggatgatttgtttcagataattcgtttgacctttagggagccatgcatgggttttgagcaagacagtgctgtgatctcatttagactttaacaaagggattggcaggcttttcataaactgaccataataagttatctggtcaccctaatgatgatagtcttaatagttctcaccttgtagggctgttgtgaggatagaatgagaggatctgtgtgaattattaaagcagaggctgtctctagaaagtgctcaataaaagttagctcttctgggtgtgtacctagaagaattgaaggcagagtcttaaagagacatttgtacacctttgtttataggagcattattcagagtagtcaaaaggtggaggcaacacaggtgtccatgaacagatgaaaggataaacaaaatgtggtctacacatacagtggaatactagccagccttaaaaagggagaagaccctatcgcatgctgcaacatggatgcacctgggggacttcacgctaagtgaaataagccagtcaccatagatcagatactgtgtgattcccccttacwcaaggtatctagagtaattaaattcctagagacaggagtaggatggtgagacctaggggcttgagggagagagaaacagggatttgttttttaatggccgtagaatttcaattctgcaaaatgaaaaagttgtggagattggttgcacaacaatatgaatatacttaacactattgtgcacttaaaatgattaagacrgtaaattttatgttgtgtgttttaccattttttaaaaatagctcttctgaaacatgcattgcctcatttaaatcttgctctaaattggtgaagtaggcttcttcattctcccatttcacagatgacaattctcctgcagagtgaggctagatgatttgttccagataagtcatttgacctttactctagggtcgtagggagccctggatgggtcttgagcaagacggtagcacaatctgatttacactttaacatagggattgacaaactttctgtaaaaggctagataataaatagttcaggttttgcagagtagaaggtctctgtcctaactactcaactcaatgtgtasatagtgcataaatgaataggcatgtctgtgctctgataaaatgttgtttacaaaatggatggctgggtttggcccaagaccataattcgccaacccctgctcatatggtttggctgtgtccccacccaaatctcatcttgaattgtactcccacaattcccatgtgtcatgggagggacctagtgggaggtaattgaatcacgggggtgggtctttcttttgctgttcttatgatggtgaataagtcccaggagatctgatggttttataaagaggagttccccagctgaagttatctcttgcctgcggccatgtaggacgtgcctttcaccttctaccatacttgtgaggtcttccccgccacatggaacygtgagtccattaaacctctttttctttgtaaattacccagtctcgggtatgactctatcaacagtgtgaaagactaatactcctgctttggagagctccctggctgctatcaccttccaactccagcatgtggagaagacagttccagaagataggctagttaactgcctcttccccacactgtatcccctaaaagtcaaccgtttcataacctgggagtaagagactcgtaaggaagcagcaagttcccaggggtgccccatcagttccaacgtcaatgctgcctcttgtcctccctctcctcattgttgcattgattgtgcaacccatctccagaactttttcgttttgcaaaactgaaattttatggccattaaaaaccaaatctccatgcactcacgcactcacactgaaagctcccaagaaggagggccctggcaaggtgacctggaggcccagcgaagccacggcagtgggccaggcatgaagaaactgtagtctctactcctgatgctggcttgacagcgctgtttgtttcaagactttattagcattgcagtgagggacctggagaatttagaggtgctgttgccattgctttctcagcctaaacctcaaagagcaattaacctggttatccaggcctccctctctccccttgtttattgccgtgaacacaggaactgcaccattaggtgcatgaaacgctatcaaggaatttaactgtaatttaaaaggctctatggggaggaccccagtggctgattaataatgcatttgtagagcaataaagactgcagcagatcagcggagctcagcctccagactttacttatgcgtctggaatcctatgaggtttctctccggggtggcagaggggtgtctacgccggagttctctggctccaaaaacatggaataggatcctgtgaaatgtggaatactggaaatggtcctgtccagatggtcaaggacatgggcttctaatcattggggttctagagttgaatcctgggtctaccaacagctatggaacattgagcacatcacctaaacctctgtgtgcctcatttttccccgtctctaaaatggggctaatgatagtatctatccaacaggttctcctaaatggaatgatgtgtaatacataataaagtacctggtgcttgtagagtaggtgcttgttcagtgctaattatcttattactatcctcatcattaaagaaagcattatttccttctggaaagctcaggccactgaggctggttcaggcttggtccygaagagcttgaaaaaggttagttctcattctcacatttcaaccagcagcaagaccttccaattctacatcctgaatatcactgctgggtccatttctctctctgtctcttctgcaacatccctgtcangtagattgtggcaatacattcctaacttacctgctcacatctgcgtctcatacccgctccctgcctctcccaagtgaatcttcattctgcatctagagtgtgcttcttaagatgtacttggaactgtgtggctcgtctgctgaagacttgccaaggactttccccattgcaagtcagtgagaccttcaggactcactgcagtctggcctacctccttcttcaaccttatctccctttattctcacccattctccctgttcctgcatcccctagagaaagcagactgtagctgaaggcttccccacatgctagtcttcctgtccatacccctgttctcatgcctctcccagcaattcatgcagttccttggatctgagtttaaacccagttatgctttctcaggcaaaacttttcttttatagcatttattccagtttattaatatgcatgtatttgtgtagtttgtttagcatcccttttccaaattaaactaaaagatccaggagggcaggttctaaatattttttttcactacttacaccacctggtactaagtagatacactggatggataaatggagggatgaatgagaagatgggtggatatatggaaagatgggttgagtggatgaaaacatggatgggatgagtcaattaatggatggataaaaagataagtgaattggacagacagatgaaaggatggatgaatggactggctgagcgagtgggtggttggtggatggatggatggacaggctgggtgggtggatggatggaaggacagacagactcggtgggtggatggatggatgggtggatggatgaatggatgaatggactaggaacatggatggatgggctgggcggatgagtggatggatgaatgggatgcatggatggatggatggatggatggacggactaggtgagtggatggatggatggactgggtggatgagtggatggatgaatgggatggatggatggatggatggatggatggatgaatagatggactgggtgggtggatggatggatgatggatggatggatggatgaatggactggatgagtagatggatggatggatcatggatggatggactgggtgggtgagtggatggatgaatgggatgaatggatggatagatggactgggtgagtggatggatggatgatggatggatggatggatgaatggactggatgagtggatggatggatggatcatggatggatggactgggtgggtgagtggatggatgaatgagatgaatggatggatggatgaatggatggatggatggatgaattacaggggtccaagtctgcaagtgaagagtccagtaagcatgcctttggggtagtctaggcaagaaatgacaataggttcaattaagaaagaggaaaagttggatttgaaaacaattcaggaggcaaatttggcagaatttggcagtctgttggctgtagagatgaggctggggaggaatcgaagaagacacctggattgttcattagaggacctgattggtgttgctatcactgactgaaatggagaaattactgcatctagaaaatgagcagatgactgccctacctcatatcatgagatatctcaccccattgtgagatcacgtaaactcctcgacttatttggaaaagttgatagaagtgggagaaactgaaaaggatggagtccagctccactggtgccgttgaaactgaaagaacagctttgcaaaagtcctaaagttgccacacacttggcatgactaagagccagaaggcggaagggatagctgaagtttaattagcaataagaagcatagatgctgaagacaaagaggagggcagggatctggtcatgcaggaccttgtaggccatgaaagggaatttagagttttcccttattggggtccgacagcatcacaaaacctgatttctctaagacaggggtcctgggtccaaagacagctgccartctgcttttgtaaaaacactaccacgcccattcatttatgcatcatctgtggctactttccaacctcaagggcagagctgagtggttgcaacagaaactgtgcagctccaaaagcctaaactattaggttggtgcaaaagtagttgcacttttggccatcactttcaatagcaaaaaccgtaattacttttgcaccaacctaatatttacagtctaactctttacagaagaagtctgctgactcctgttctaagacaaaagctgaaaattccggcctgctatttcctgtgtgtatttgaacattttacagatttgccattgtcttcaaaaaggattaatgggaataaattacagatttaacaaggaataactgcaacttgtttctccagggtttcagttgacttttagggatggggtggatgaatggaaaggccaggggaaaaagtgctctgacttcagctcatgataaaaatcccccagcctgtgtgccaggtaccactgccctcaccgaaaggatgctaagtgaaggtggaatggcctgacatgtaccagatgctctacaaatgtttgctgaactgctaatgcatgaacaatgaccttcagagggatttggagccagccttacgcctggaccattttaatactgacttggaaataaggacagacacttaccagcctgctactgacttttacctgggctctcagctaacttgcttggaatggactgaacccccagtgtcacccaagtgacccgagaggaacccctgcattttgccagcagatggcatccagcaacaacatcccatggtctcccaggaagcagaactaggcccagatgaatattggagcatcctgtagaaacgctggtaagaaatgctgatgaatccgtctccggattctaattacaccgctgcgtctctcaggaaggaagagaccttttgccacaggcacacttcactaatctgaaacccaacacagactcagtttaattacatgtgcacttcctggagtcatgagaaaggttctgaaaaaccagttcactgcctgtcaggacgaagggcattgatcttaaacctccaaccagtatcttcaaccaagacacattgctgagtgtgggaaggcagaggagagggcaggagtcaccccaagggaggccaacttgtggggtgagaaaagtccatttggaaaaaaaaattaatagtttctctaatgtattttggaacttcttcctggaatgagaatggggaaaaaatactgaaaaacacagatctccttctggagcccttcaaataataataatgtaataattgggattgtaagttgaataccagtatttctactttatggacattaaagtttgagaagcaccaaacttcgtatattacacatccttagaatctttcatcttttaaatccccaaacaagactcacctsaacattgttctttacgttactttctgcgttgaacagccacctaaatgccaattatacctaaatcaagccyctcttcagaatttcagaatcctatactcaattgctaagtagatattatggattacattgtatcccccaaaataggttgaattcctaagccccaggacttgtgaatgtggccttatttggaaatagggtctttgcaaattatcaagttaarrtgaggtcattagagcgtgccctaatccaacatgactgtgtccgtataaaaagaggacgttcagacccacagatagacatgcacactagaagaatgccaagggaacatggacgtaaagacaggtgatgcatctcaaggccaaggaacatgaattaccggcaattccctaggagccagaagaaaggcatggaatagattcttccttctcagccctcagaagaaacgaaccctgccaacgcctggatcttggacctccagcctccggcactatgagacagtaagtttctgctgtttaagccccccagctgtgtgactttgttagggcagccccgggaaactacaatgggcatcaccagtccgatgtcccactgaggtcacagtcccacatcagtttttccacactgtcccctcaaccaagtccagccttttttttttttttgtactctccatttcagttgtgatactgacactccttagtccctctaacaaaaagtccatgtgtctttgattcctgatagccatttagactcgtaaaggaagaagaggtggtaagaccctacacatgctcactttcactcttagcatggagactaaagccagcaagatgccaggcccaggctagatgcttgaattttctgaattagttgctaataattaaaaatcagatgcttgtatttaaatttcaagatctccagcttccctcaagataaatggaaagatctagcaaccttaagccttcagggccacacatggccatgctgatctgttgatgaaaaaggcatctccagaccagcctgaccaatatggtgaaaycccgtctctactaaaaatacaaaaattagctgggtgtggtggcgcactcctgtagtcccagctactcgggaggctgaggyaggagaattgcttgaacccgggagatagaagttgcaatgagcagcagttgggccactgcaccccagcctgagctacagagcaagactctgtctcaataataataataataacaatgattaagtaatagagagtgatgtatgtgattaaaaggctagggatggttgcccttagaacctgggtttggactaaagctgttacttggagsacactcaaggtgcaaatttaccaacacgtcagattttctgtaaacagatgcaggcactaggcaaacgttttttaagccagaaagctatatcaagagagacacagtccttaaaggaactgcaaagaaagcatttgtcataattccccactcagtatcctgaatgcataatttctaccgtgactcagcgcgtctttggggactgagaaacwaacagtccctttcgtgcatacaagaaatactgagaggcattgagacggggcccttcgagtttgsagtctgccactgcctctttccagctgtgtgacctttggccaggttagctgacctctctgaaccccatttgtaaatggggatactggtacgtccttttgcaggatgggtgggaggactggagagaagagctcacccagcaccatgctcagcacattcagcacatagtaggtctccaaaaaaaaaaaaaaaaaagatgataatgatgatgatttggctgttagtggttccaggccactttcaacacgtctcaacttgtgtrtgacttgaacagctttgtctgacttgtgtgagataagggagcttttccctctgaaatctagaactacatttaatcaggcatcagtaacctccattcccaaactgaactggaacaagctacttttcacactaaaacaaagcgaggaataaaatagagcaagatgactcyacttttttttttttcaggaagttttcccattttctcataatgagagatgattaaaataaccaggagacaratgacaccaaattaataaaaatgtagatcaaatgatcctccattacctattttgctcagttgcagttgaagaatgcattgattaaactgccgcagaccattatggtcgtattcattactatagcataatctgttttattatgataggataataactaacacagtcttgcagacagacrtttctctgtgggctaagtaatcatttactgtggatgtgcaccaaggaatgctgggttcactttgctcagggtagacttgaaccttagggttgcagagaagatggtttatttatttatttatttatttatttatttattttatcacatggctcagtttgctggattcccacatggggagggttcttcgagtgctgctgtgaaatgtataatgatcccagagagattttagaaatgccaaaaaaaaaaaaagagtagtcaatgagctgttagttttttgttgttgtttttatctactctctacccactagctgatttgattgatttcttatgtgcttatttacccattatttatttattaggtatttattcattattcattaggcaaacgggtgatagctgtgcagaacttagtatctcaagacttagcgttgatcagagcctcatcggaaaggcaaagatgtaactgaacagttaagcggggataaaggtaggcccagagatttgcaagagctgaaatggagggatgattttgccacttgggagtgaaacatctagagttggaagtggtgatgacttgggtgcagaaggcaggctttctgcaattgaatccaggctctgtcactcacaagctaggcattcttgggcaaatcacttcatccctccagtctaaggtttttcctctgcaaaatgggcgtggcagcagtacccgcctcactgttgacacaggtaccagttatgagaatcactccataagtgtgtcttaggtccggtcttcttgaatccttcagtatggaggagccatgtcattagcatcctttgcttggcccatgaggaaactaggacttagggagagcaagtaaccttgcctgaaatcacccagctacgcaaaatcagagccaagatgtgaagccaagtctgccgcacccccaagcacgtgcgcttaaccaggatgaagttggcatttcatacactggtggtatttatagcaagcgtcacaaaataccccaaggggccaggcaggatgtcaatgcctggagtaggcaggtagaagctgccactcacttagctccacgatagtgtaaagccccaggctcccttgccttgagaactgcaggcccaggcttgcttgctcactcttccaattattattctttttgtaagaaatctgagttttaatctgaaatctcttgatttaactgacaactattttaatttaaaacaaagcagcacaacagagtgtgagcccaagaaaagctgtctgcaggctgggcaggcccaggagctggcagcctgcaatctctgctttgaagcagggcgcgtctgcaggccgcttagtatgcgcagagccctgcaccacaccttcctacttaaatttctgctctgaggactcttgctcgcttccgcagtcagaagtctccatcactagcttgcagcgggaaaccaggctgcttcctttccaggccctccttttgctttgctcagcactggcatccatcactcactgttttcaagcaggatgggcagtgcctggcctgcaatgaaacttgtcttctggtgccacctcccattttctgagtgttttgaggctgggcatgagtttgccttgaggtctccttgaagccggcaggggatgcaaaattctcatcgagttgctttctgttgtcatttttcctgtggagttggggagaggcttgttggaaggttctggtgccccataatccaccctatttgatgtcaacatgcatttattaaacggcccctctttgtatgtggcaggtgaagggaaggtgccccctgaagagcagaggagacaagtcctgatagtgtatgtcagagagtgatatggtggaggcattaaaaaaatatgacacaaaagaggaagaattatgcccaaagggggcaatcagtgaaaacgtcgtagtctttgagataaataagtaggcgagtatataatttcaccaggtcaagaaggacagtccaaatagagagtacaataccaccatcaccaccgctgccaacattatcaccaacaccatgacgaaggccgccacctcatatcatcaccatcttcatcactaccaccattgccaacaccactatcacctctaccactgccgcccccatcagaatcaccatcaccaccaccttattatctctttcaccaccatcctgttatccccatcaccaccactgtcatcgccttcacagtcatcacagctatcaccatcacctccaccaccatcactgccaacaccaccgccatcttcatcatcatcaatcaatcaataatcaacattactgagaacataccataaagccctttgcaagttttatctaatttgagattcagaactttttgacatgggcaatatatatatatatatrtrtatatatatatatatayacacacacacacacacacacacagacacagacacrcagacacagtcatgcactgtatgtttcagtgtttcagtcaacggtggactgcatatacaatggtggtcccataagagtataatatctattatagatatagatattataatcttattataatagattataataataattatatataatatattatatataatcaaatatgaaggtgtatatataatatatattatatattttatatatagtatatattgtataatatattatatataatcgattataatctattatctattatatattataatatatataattatcgattatatataataatagattattataataagattataatatcttacgggaccaccattgtatgtgcagtccatcgttgactattcagccctattataggggctgaaaaattcctatggactagttacattgtagtcataacatcatagtttatttttttataaattgagtgtggcctaagtgtacagtgtttataaagtctacagtaatgtacagtaatgtcctacaccttcatattcacccacgacttactgactcacccagagcaactaccagttctgcaagctccattcatgataagtatcttatataggtgtaccatttttatcttttataccatattgttactgtaccttttctatgtttagatatgcttagatgcacaaatacttaaaattgtgttaaagttgcctacagtattgagtacagtatgatgctgtccaggtttgtagcctaggagcatataacctaggtatgtgctaagccaccccatgtaggtttgtgtaactgcgctctgtgatagtctcacagcracaaaatctcataacaatccactcctcggaatgtatcccatcgttgtgatgcatggctgtaccctcacttaaaggtaaggaaattgaggcttagagaaatgaaggcatttatgaaggtcacacagctcaactgatgtggctgcaaattccaagccagctacctgactccagagccaacactgttatccactgcaccccactgccccccactgcctgtggggagaaaggccctgtaggatgtgtgaagtgcttaggacactctagaacatggtaaatgctcaataaattgttagatactgcagcttacttcagaagaatgatagtgattattgcctaaacaaaggatttctgtattcaaatacattaggaaatggtggattaaacaaatgcaaagcaagtttttatttggctgcagaccttgtcagagcctttcaagggcaaatgcacattggaaatctccaagaagcaatgcgtgaactgtttccttctgaacacattcaagactagagttccttgagaggcacaagtcatgagataaatgatcaagagcatcaaagtgggattctgttagctcagggtttttcaactgtggtcctgttgacactttgggctggatcattctttattgtcaggtgctatcctgtgccccttggatgcctttggcctcgacttactaggtgccggtagtacagggtcacccagttgtggcaatgaaaaatgtctccagatattgataratgtatctagggggctatatcacttccagttgagggccactgagttagcttatttaaagcatagagaagagaataggcctgaaatgcctacattgaagggaccggaggatgaaagaaaaggctatcacggagccaagggaagtgatgaaaggtgctcagatgaccttggaagggcaggaccagggctgccaaaagagcagggtattccaaaaagaggaggcggcctccagctgtyggaagctctggaagaaaaacggagaatggatgaagacaagcctttggattttctcatcagcttcctttggaaaacaactccagttgactgacagacagcaggcagatttcagggtgcagagcaggaccatctactgctcacggaaggcttagagtggccaatatcaggaaatgctgttaaaatggggacatcggaactagcccaggaaggatggaggccagcatagtggacaggcagcaatgcaagggagaaagtgaatcagtcaagcttcagacgaggaggtggacagggacaggatcaagagcatgatcctgtgatcatgggaaggacagttgggcacattcctctcgcagccctggtgggtttggctctttgttttagttccctacggccaccataacaaatcgcttcaaccagcgtggcttaaaacaacatgaatttattctctcgtcctggagaatgagagttctggaggtcagaagtccacactcaaggcatgagcagggttggttggttctagaggatctggagaagcatccatggctctctcctaggttccagttgctgctggcgttccttggtgtttcttggcttgtagatgcaccagtgcagtccctgcctctatcagcacgtgaccttcctgcatgtcttcacatggccttaggagaagatgagtcattggatttctagcccattctaacccagtatgaactcatcttaatttaactaattatatctgcagagactgtatttctaaataagatcacattctgagattctgagtggacrtgattttggagggatgccgtttaacccagtacactcacatacagcttatttttttacaaatgtgaatttgtaaccattttaaaattgkgataatgcccataagaataagtatttctggagtcttctggaaaaccagaagactgagcaacttggaatgcattccccatggtaaaatgattggcgctgagaatggatcacctctgttagggtgaatgggcttgttctaatttgcctctgcccccacctggcctacttctctcattgaccttacatgggtagcccagtgtggcctggaatttgagatcccagcataagccataaggctggggcctagcccagcacttggagtagactccatactctctagtttcctcgtggtctgatagagatcagaggcatcacctcctctcagatgttgtttgtgatytaggtgtaactacagtcacattcatccggtccacataagcccacagctggggtcacatgcacaaggaggatggaggcaaaccagccctcacatggacatgcgggccaggactggcccgggctacagttcaggaggccttttgcacattttttgcacgtcagttctggaatctcacctcagaagggcatggtgccagaggcgaatgacactaacttgagaaaccaaacagatctgtacaaaaaatacaaaaattagccgggcttggtggcactcattggtaatcccagctacttgggaggctgaggcaggagaattgcttgagcctgggaggtggaggctgcagtgagccgagattgtgccactgcactccagcctgggcaaaagagtgagactgtgtctcaaaaaataaaaataaaaggaaatcaaacagatctggatttgaatcccagctgtaactctagctgtgtggcctgagacaaatgccttaatctctctgagtcacagttttctcatccttagaatgaggatacaatctactctgcccaagggtgttttgggccaggtgtgtaaaatgccaggtatgaagtgggccctcagtaagtagcaatcatgtaaaaaygattgttgttcctattgtcagatgagttccagccaccagacagacagttgtcacacacaggtccggaggagcaaaatggatggagagaaggggagatgaagctgcctccaatcagaagccttctccaatcacaagcctccaccgatcagaagcctcctccaatcacaagcctcctccaatcacaagcctcgctgatgaggacatggagcttctaagtcccctattggctgcttgagacaggacatattctcaacagcagtcacctcctcccctcagcccccaaccccatcaccgttctgtgcccattttgtatgcaccactcagtgtttaggtgacaccttattaaacaaggtttgcctgtgaccaggcaagtcacaatgaagtcaggaattaagatatagcttcctgcatcacctaattggattacaaggatcatatgaatgctgtgttgactatgaaatgtgcaggggattattcagtaatgactttcttctgtcgtccttcactaatcctgtcaatcgggaatgcctttagattaggaaagaatcccactggaaggagctgtctttctcatttacagttgggcttccccaggggctggagaagcagggtcactgtagctcacttattggccagtgaagacagccgccatatctaagcaatgactctattcctcatcactggtctgggttcctgatccaaacctacaacagtcaatggacatttctaccttggggttccacgagctaagggtctgaaaaataacctaccatccttctgcctccaaaatctcctgaacttttttcctaggtgaataaccctgttattccccaagttgcccaaaccaaaaatccaagagtctctgttatttctactcccttaaatccacaaagtcgctatcatttctaggtcctaaataccttgtatctgtctcctcctccccagcctcctgctctgccctttaggcatgtattgtctctgtctggtagtattacagtcacttcccaactctttctcctgctccatttctgcctctgtcttctcttcaaaaacaaaaacaaaaaaacatggcttccagagtgagctttaaaaaatgtgcttctcctcacatcactcccctgatgaaaaccctcatcaaacaaggaaatacattgcagcttgagcctcttctaccttcctgggccaaagcagacattgctaatcaatcactgcattgcgtcctgcaaggcaggatttggactcagctttgctatgagttcattgggttgacaagagagatgagaactatttgacatctcaggatccttcctcatctgccctctgcctgccagccttgttcctgctgctcctcctcccttacctgcattgtagaattcacctcccagccgtcctgagctcaggggagttctgagtgactcataccaccatacctttgcacatgcagttgcctctgtgtggaatgcccttccccaagtgtgtctgcctggaaaacttttactttactcaggtgccatcctgtccatgaagtctcgagatttaggtatttttctccaagcccccattgccccatgaccaggtgttcattttagggagcacccccttgcactgacgttgttggttagcatgtctgagacagagataaggcttatgcgtcttcacacccctggtacctgccatggctccactgtgctcaggagctgtttgtaaacaatcaaatgggtgatggaataaatagcatctgtcttactgaatgcttgctttatgccagacaccaggctaagcgctctatctgcatcattgtatcccagcctcacaatctctctgtaaggtaggcatgggagtttttttgcacatgtggaaactgaggctcaaagcaatgaagtcatttgctcaaggccacacagtgatggacccaggtctatctaaagtagtatttttttttccagggacatttggcaatatctggaaacttcgtttttattttttgagacagggtttcactctgtcatccaggctggagtacagtggtgtgatctcggctcactgcaatctctgcctcctgggctcaagccatcctcccacctcagcctcctgagtagctggcactaccaccaccaccacacctggctaatttttgtattttagtagagacagggtttcgccacgttggccaggcttgtctcaaacacctgacctcaggtgatctgcccgcctcagcctcccaaagtgctgggattacaggtgtgagccactgtgcctgctggaaacatttttaatggtcacarctaaagaaaggatgctcctggcatttagtggatcgagtccagagatgctcctgggcactgcacaatgcacaggacagcttgctgtcacctccaatagagagttatccagcccatagtgctagtagtgctatagtacaagggtactacggccctgaggctttgaatgtaacggtggccttgaatgtccctacggtatgtggctctgtaactgctgctggtgtttcattggtttcagttgctcagagtcacaagctgcacaaatacattcagaaggtgctgccttccctttggttgtgtcaagaatggcagagagaatagggacataggtccagatatgccttctactaaatcttgggacttcatcatttaaccataacagcctccaaggataatagttctcagwgtaagccgtctcccccattctgtccatcctggaggggtccccttcaaacccactacctcatgcaaatttccagcagctgaaatgaatacatgcagatttttttttataattttttgcagatgttcttaggggtaaggtaaatatgtaatttacaaaaatccaaagaacttatgatccgaatctgcttaagccacatgaagtcaacagagggttaaaagcacccaatttattttcatcaagaaatttgaactttggtcgtagaatgcaacttagctgcgattctacattatttatgattcatggggcattgtaacttaccacagtctctgagtaatctttttaagcctgccaaaagaaccggtgttaattgcttacactggaacatatttgctgttggaaatgtcacaccataattatattccatttcgctgtctaacaagtaatatactaaaagaaaattgggttttttttttttcctccttcttcttgtgatgtgcaaaaccattcctgaaacgcttcaagcagctcgcaggtggcaagtttctggacttgtcaagaaattaggcagaaaactttctgggtttgctgatggtaatacaagccagaccagcagggtctgcttggtggactttgtaacctgagctcatgctcagaaagccccatgttagattttatgctttgctttcaccgtcttgacactcttaatattttttgaacaaggggccttgcattttcatctgtagtgagccctgcaaattatggagttggtcctaaaaaggaggaggaaagggagagggacatggcccatggagactgggattaaagatcaggaaacagttgacgtttcagaacatgatgagaatttcagagacacagaccaattataaatrgagagagagagakwgtgtgtgtgtgtgtgtgtgtgtgtaaaataagaattggtggcttacgaggtcacacaggacaaaatgtctaatcagatgactcttcctggaagactaatactatatttggtaggctgagcatctgttaaaccagggactggcaaatgatagcccacaagccaaatccggcccaccacctgttgcgtaagttaagttttattggaacacagccacactcatttgttttggtcttgtctgtggctgccttctctctacagtggcagagttgagaagttgcaacagagaaccatatggcccacaaagcccaaagtgtttactgtctgtcctcttatagaaaataaaatatttaagattcctgtcttaaaatctagggagagcctcatgcacctcgctacaagagaggctgagaagtgttgaagaaatgttgataagtgtcacattctcatttgtaattgtgtataacagaggggaaaatggatgttgatggatggttagctgtctctggcataccccttttgcagatttggaagctgaggaggcttcaagagttcatgaagccatttgcccaagaccacagatcaaataagtgacagagccaggacgcagagggaagcctgacttgaaagtataaagcacgtgctttctaaattgtgatagcttccctgcatctgctaacaagtgcacgtacactgagtaatcttttgcacagatacactgataagactgcgaaataagactgtgaaagaaaacaagccaaatcacagatggctcttgcccccaaagggtgattaggcatgcacgtgcctggtcttcatagaaggcagatgctgctaaaagtgttcgttgggtcattcatttgttcatgtaagaaatgtatggaaagtttaggctttgtaaatggttcaccttcacccatctcaatgccttgcttttcctcctgtccgtcttgtcgctgatagaatgtggtcaacaatcagaacatctgtacaacagctcctagatgaccaatataccacagccttcaattaaaatatgtcaggttaccttcttcagtatttcctttccattttccactttgggaaattgaagctcaaaggttctggtagcttctctagataacagagctagcgaggtctggtcctagaatttgaacccaagcctttctgccttcagtaaccaggtatagaatcactatattagttagggaacatcagctgctataacaatcaaacgtagcaatgtttgtttgcgttgaggtcacacagggcaaactgtctaatcagataactctttctggaagactagtactttatttggtagatagagcttctcttcaaccagagatgggtaaactgtagccagtgggctgaatccagcccaccacctgttttgtaagtcaaattttattggaacacagccaccagtgtataatgtctctaacatgaagatggttgatgtcttcatcctctgccatccaaaatagatgttcctgattgactcccctccatgttgtaattcagggatccaggccctttccatctgactccactatctccactatcttcaacacacagcatccaaggtcaccgtgctcttctgcacccagacagtgaagagggaaatagcacagagaagcatgcacaggtgtccatgggtaagcctagaagttgtgtgcatcacatttctattttattggctaaagcacagcctcttggcaagacctgactgcaaacgatgtgaagtaggttgtagtgagtgccatgaataaagcagacgtggttttgaccaagagcctcaaccactctgattgccctactgctctgcccagagttgcttccctttcctttgggttatttccagccccctggcccctgtgaaatacatgtgaccacgtggctctgttcctgcaaaagggtcagcttccccaatgctgggaacacatctccaggaagcattcctctgtgagtgcgactgtgcatctgacagggatacggggcacagcgggaggcaaggttagtaatttagttgttactggctgacaggttagtcttagaatatgttccctgcaattcaaggcttgcacgaaagagacagagagaggcacttaacaaatgtcagcctttcttttttttttttttttcctggcgcagttgcctcacactgaccctgaagcatttgaggggtgtctctgtgtgagttcatcagcgcctagtcccagcccccgcttggtgttcttgattcctctttcctgtgaggtttccctgagtgtggttcacgaagagcggccgtcacagttgccagagggcccctgaaaatactgaaatactgccagggtggtgatctggagggaggaatgcaggattctttttttttttttttttttttgagacagagttttgctctgtcacccaggctggagtgctgtggcacgatcccggctcgctgcaatctctgcctcccgggttcaattgattctcatgcctcagcctcccaagtagctgggattatgggtgtacaccactgtgcccatctaatttttatatttttagtagagatggggtttcgtcattttggccaggctgatcttgaactcgtgacgtcaagtgatccacccgcctccacctcccaaagtgctgggattacaggcgtaagccactgcgcccggtctagattctgcattttaataagctcctcagacaatctttttcaggatcacgggtttcaagcagtttctcaaccttggcatttgacattttgaaccagataatcccttctgtgggggccgtcccgtacatggtgggacgtttagcggtatccctggcttctacctcctaggtgccagtagcattctttcttccagttgtgacaaataaaaatgtctccagacattgctagatgtcctcagggagacaaaattgtccctggtcaagaagtgctggcttagggcataacttagtatgtttctgtgacataaaatataaatgttcctctaggacccatgttcttctctccattactaactcccaggtatctgggtcgggtcctaggattcagtctccctcagaggaacgtgagtggaaatgatggttacttcttggccaagccagttgacgggctgtgaatttgtcatgccaatcgctgtcctctctgtgcactgcaagagaagggtgctaaggagtgggattgtgtagttgaagcaatttggatccwcaagtcacctcttggaggacggccctgtaggagagctgctcaagctgcataggagcaggaaataagcctttgttgggttcaagccactgcgattttgggatccatgtgttgagcccagcattgccctggctcatactggattttagtgctctatgtaaagcacaaaggaactgtcaacttcctctcttataagtcatctgaaacctgttctttttattttttcttggagacaaggtctcactctgttgcccaggttagagtacagtggcgtgatcatagctcactgcagccttaacctcccaggctcaagcgatcctcctgcctcagcctcccgaagagctgggactacaggtgcaccccaccacactctgcttaaaacatattcttaatacatttaaggcaggttggagtaatggctttggaagcaggttagtctgggttcagatcccagcttggccactagctgtgtgatcttggttatgctatataacctcttgagtctcaacctgttcttccttggcaaaagtgggataatgatggcatctgtctcagtgttttgagacgatgaactggaaaaattgccaccaaccaaccaaccaaccgaaaacactcttgataccatgcccggcatatagtaagtgcttaaaaaaatgctggcttttgtcaatatatttctggcagggtcagtgtgtatgcattgtttctggggttagcatttttagtagagacctgttttttgccaatcagtcagcttcccgtagctttattgactataggacatggttctgtgaatattgaaaaggagtgatggctgccggagagggacgaggaccccaaacaatatgttaggaggtgatgattattaacaagaggcaaggaaatgttgttgccaccatgaagccgtaagggtggaaaacatggccaaggagtgtctggatcactcactcattctgcatttattgccctagtgcctattttgtgccaagggacagagataaaacagaaagccaatctttccacattttcatgtacctccaatactacacaatctgttgcttttaagaaaaggacataaacaagcaaaggcgcactttctgcccagggtgagatctcagtcatagttggagagacaagcaaatgattttatctgcccaggcaaacaagcccaggaagagcatcagaagttaacacaggccgaacgtggtggctcacacctgttatcccaacactttgagaggccgaggcgggtgaatcacctgagatcaggagtttgagaccagcctggccaacatggtgaaatcccatctctactaaagatataaaaagtagccgagtgtggtggcacacacctgtaatcccagctactcgggaggctgaggcaggagaatcgcttgaacccaggaggcaggggttgcagtgagccgagattgcggcattgcactccagcctgggggacasagtgggactacgtctcaaaaacaaaaacaaaaagttaacacagacattgacctgagttccccaaatttatccagactgcctccaatcccggctacccactgcttctctcaagtgtgttatatgagaacgcctaggtggcctggcctgggtgacagcttgctcagatttcaattgtgctcatattttttttttaaatggcagtttcaacaaatcctacccactgatgcattgtttaaccaaatgtcatttctctgcctttctcatttaagtatcatctgttaggtttacacattggtacacccatgaaattaacattacatgtgtttccttttggagctgactaaatttaatttaatttaaattgttttcactgtcagtggccttcccaagctgtggtagcacacgttctgtctccttaaaggcttatcttaactgcatcctgtcaaaaaatcctaggacccacccactttcccctgcagttctctggtctaggggccagctcatgtttaaaatgagcttcctctgtcagttcattcagagaggttcttatttagaaaagtttattctcctgcctcagcctcccaagtagctgggactacaggcatgcaccaccacgccctgctaatttttttgtatttctagtagagacggagtttcaccatgttgatcaggctggtctcgaactcctgacctcaaatgatccacccgcctcggcctcccaaaatgctggaattacaggcgtgagccactgcacaggagaatcacttgaacccagaggcagaggttgcagtgagccaagatcgcaccactgcactccagcctgggtgacagagtgagactccatctcaaaaagagaaagaaagaaaagaaaagtattctcaggagccccctggcttaaatgaagtttccaagccatcgttgagaaatcagggtctctctggtcttccaggtaggtcgaagagtgacctgcctggagctctcaaaccaatgttagggaacttgactcgattaatacaagcaccaagacagcataatggttatcccctcaatgatgctgtaatggtaaaagacaagacgtagcgttcattcatttcacatttatttagagattcgcctatcatgtccatctggtccagtgtgcagccctgcagtgtgtcacccagtagcaggcatttgataattatttctctttttttttctttttctttttttttttttttttttgagacaaagtcttgcttagtcgcccaggctggagcacagtggcacgacctcagcacactgcagcctccacctcctggttcaagcaattcttgtgcctcagcctcctcagtagctgggattataggcatgtgccaccacgcccagctaatttttgtatttttagtagatacagggttttaccatgttggccaggatggtcttgaactcttgacctcaggtgatccacccaccttggcctccaaaagtgctgggattacaggcatgagccaccatgccctgccgataattatttctcaaataagtgataagtccatcctgtccactgctgtcttccccctccacctcacaccctgccccctgccactgccccagggtatagcacactcacaggcatttataattattcatcaaatgaacaaatgactttgtgctggcacatgcttgggaggtatttcaaagtttttacagtgatctcaggctgtgcccgtggaggatcttctagtcactcccaggaagaaacatgacaaagagaccttacatgttgtaggagagaaattgaatgagcttggaatatgcaggtggcttagatttggagggagatgggggccggagtaatagcaaaataacaatttccacatatttgagaggttggtttgccagagaagcagcagcactatctttgaagaccaaattaggacctatggatgaaagcttcgagcaggcacattttggaagcgatagctcacaatcactgctgagcacaagccctgctatgtaaggcactgagccttccatctttggaggcatctaagaaaaaatacccagtggccctgaattacttactcagtaagttcttgtcattaccctacagaagtcttaaaaatacagaaaagcaccaaaggaaagtaaaaaaaaaaaacaaaagtccgcactactcccctctccccacccctgagtttgctttttcgctttgttttgttgttcttgttgttgttgtttgtttttttggtgttttgccttttcttgagaggaagcctcactctgtcactaggctggagcgcagtggtgtgattttggctcactgcaacctccaccccctgggttcaagcagatctcctgcctcagcctcccgagtagctgaaactacaggcgcgcaccaccatgcctggctaatttttgtatttttagtagagatgaggtttcaccatgttggccaggctggtctcgaacacctgaccttgtgatccacctctcaaagtgctgggattacaggcgtgaaccgctgcgcctggacccccaacgttttttgtcttttttttttttattattattattattcaaaataagaccctccctgccttgagaccttgacacatggtcttccttccttccaaagtgacatcctttcacctggctcactctttatgtttcacagctcagcttcaccgtggcttctttggaaaggtctatagacctggtttgcatcagatcacctggccccatctctctcctcccctggccgcccgtacttttcattcattgcatccaacaccttttgtaaaatacgttgatctgttttctccatccaacatccactggactgtcagctccttgaatacagattcaacactggttttgttcatttgggcattctcagtgcctggcagcgtagctgctctgtgaacatttgagaagggaaggaggagggtgggaggaaggaaagagagaatgcctgtattcactgacagtgaaaagatgtcaggagtacattactgaaaacagaatgcatatgacaaagcagaacatacatgattatatataacgtgagtgcataaaactatttgcaaaatgttcactgaacgtttgttaacaatggtgatattttggcactaatatctggggttttttttacttcatattgttctgtatgcttgaattttctacagtaagtattatctttgtagacagagaaatccaagaaacaatcagaagcacctaagaagtgaagctagaacagagttcgaaacgaggtcctccttggttttctcccaggaactgcagctccccaagtggtgtggtctccttgtctgtgtatcagagccccggcctgaggctgagcccagctcacatcattgcagggagagggatctattgagatcccagtgcatttgaggtgctcgttgttacccactgttgtgaaccctgttgcatgtgtgtttctatgtccatttattcaacaggaatttactgtatgttccaagtgctcctggcattgtcaccagacactctcctaggccaagtaaatgaaacaccatccctgccctctaggagcaaaaccaaatgttgtgttgactattgctgctcgttgctgttgtgatcaaccggagatttcattagcagtaggcttgacgaagaggaccactgtgcttagagatgtagtccttatatttcaagaggcaggatgacagagtatcctggaatcagtttgcttggactcacatcctagctccattacttgctagcatttgatcatgggcagattacactctttctgtctgcctcagtttccccatgtgtaaaatgagaatgatagcaggacctcataggtttgctgcaagaactcaatgagatgatatgtgtacagggcttggccgagtgaccagcgcaaagtaaatcctacccacatgagcttttataattattcctgtctgcattatgtgacgtgacagcattaatgtgacaaatgggaaacgatttggagaaatgtcccttttttaaaagaaggcacctgcagaacatatttatggtttatgatcaggaggcagcgttaatggcccataatgtgattactatgaggatttttattaggaaaattccaaccaatttggcattaattaatgtactgttaactttagagtgttactcacttaatccttggagagttggagaaaataaacctgttgtcaaaacccttcctctgagaagtaaataagagttgttccctcctcgagaggctccctttgtaataaaaatagatgagtcgctgcgtttttccatggcagtatttattgagcctgcgagtcccttcaagagaggagaaacgagggcagagatgaaaatgtcaagckacaggaaggctcgtaggagaacttgcacacagcagcctctgggtcaagagggcagggagtacagatagagcaggctttctggacacacgaagcacagagtgcaggatatgggggcccctgcctgtctttccaccccatgaagcaaggcatcccacaccaccccatctgggaatttcaaaatgtgtcctgcctgccacccactcctcaaccatggataacaagcctgatgaaagggcttgttactctcttcaattgcagtccttaaggtggtacccaagaccctgtgtgatgcctctgctgtcggcccatcctcatcttctgcacttcctcttggcctcagttccagccacactggccttcctgtatgtcttctccttaccatactatcattcgtgacaggccctttgcatatgctgttccctccacttagggacacttttccctcttctcttacctagttaactcctcactcaacctgtcaattgtagtctaaggggcacatccctggcctccttgagttgtatattagtctgcctgggctatcatttaaaaaaaattaccatagaccaggtggcttaaaaaacaaatatttgtctccattttggaagctatgaatctgagatcagggtgccagcatggttgggttctagtgagggccctcttcctggcttgcagatggccgacttctcactgtgacctcatgtggcagagaaatagcaagctctccagtgtctcttctaagagcaaaaatcccctaaattcaaggctccacccttaggacttcatttaacctttttgtttgtttgtttatttcagaggcagtcttgttttgccacccgtgctggagtgcagtggtgcaacgtctgcctcctgggttcaagtgattctcctgcctcagcctcctgagtagctgggattacaggtgcctaccaccatgcctggctaatttttgtatttttaatagagacaagkttttaccatattggccaggctggtcttcaactcctgacttcaagtgacccacccacttcggcctcccaaagtgctgggattacaggcatgagccgccacactcggcccaacttcatttaactttaatcacctccttaaaggccacatctccaatacggtcacaggagrggctaggccttcaacatattaattttcgggggacacgattcagtcctagcaaatcctgtctttggaaaaggaaaggatacctcagcatcgagaaacagaagcagaggtttcgtgagattaaacaacattttggcttcacagaaagggtgattggaggagcatagagggaaatgaggttggaargaggagaagagaaaatgtagtcatttgcaaatcattatttaaggcaacaataatgatggccaccatttcattttctgcataccacatactggtcctggagatatttatgtgtttattatctgtcttctttctcaggagaggctgcttctcataagcaaaagctcttgtggcgtgtgcatgagtctatttttcactcccagaatggtgcctgcctggcatatcatagacattcgttccagttacttctgctgggtagcaaacccccccaaacttagtggcgtaaaacaccatcacttgttatgctcttggattctatggatcaggagtttggaaagagcacataggagacaggggaaagacataatgccccaggttcagagctactgctctgtactaggcacttctctgagcataattccatccatcagttcctccctatgaaggagggtcaatatgtatccctattttactgatgatgagctagaatctttgagaggttatatagcttgcccgacctcccagagttaatgggggaagagccatggtttgaatgcagatctgtccgatttcaaaacgaaacttctttccactctgctatgtagcctttccagagtggctacctgtgtttgccaaaaagtgggaggccatcttggcaggaagccttctgcctcccagggagatgagtggttctcaaaccatgctggtcccctagggggcactgggaaatgcaagtgaggagaggctgttatggggactagggatttcaaatgccctgtaatcatgggataataccactcaaagaattgtctcttcccaagtgacagtagtccctgttgagaaatactgcttgagaagggaggaggatctgtgaaatattgatctgtgctgaaaccctctgaaaggttgctcaaatggctaggtgcggcagatcatgcctgtaatcccagcactttgggaggctgaggcgggcgaatcacaaggtcaggggttcaagaccagcctggccaacatagtgaaaactgtctctactaaaaatacaaaaaattagccgggcatgggggtgggcacctgtaatcccaggtactcgggaggctgagacaggagaatcgcttgaacccaggaggcrgaggttgcagtgagcagagacctcactactgcactccagcctgggcgacagtgcgagactcagtctcaaaaaaaaaagaaaagaaaagaaaggttgttccaatacaatagaagctcaggggttaaaagtccccattttagtgtctgacagatggagggttgaatcccagttctgcagcatattagctgaccaggtcaggtaactactcagagtctttatttccttatctgtaaaatgggaatagtcagaatgcctccctcaaaggtctgctgtgaggagtaaatgaggtaaggtcttgtattggttcattctcccattgctataaagaaatacctgagtggataatttataaagaaaggagttttaattggctctcagttctgtgagctgtacaggaaacatcaaggcttctgcttctgaggaggccccaggaaacttacaattgtggtggaaggtaaagggggatgtaggtatgtcttacagggccggaacaagagcaagacaggggaggygccacacacttttaaacacgcagatctctagagaacagcatcaaaggaatggtgctaaaccattcatgaaggatccacccccatgatccagtcacctcccaccaggtcccacctccaacactgtgggttaccattcaacatgagatttggttggggacacagatccaaaccatatcaagtctgttagaaaatgctcagcccaggacctggcacacagtggccacattgctattatcataatagctctttcatccttgatgcacagaaaaggtaacatcagcaggatggataagagcttgcaggccacagcgcagcgttttcacagatgatatgttacaggccaagtgactgggacccagtgaattgcagtgaaatgtaccatacaccrtcaatatctatcccaccagtttccatttattgagcagtatatcattagaatatcccagggctctgaacaataaaatcaataagacggttcagtcatgggctgttctttaataactccagacttgaatggggtcgggggaagtcagtgagcaggaaaatgtcctgagtgcttggtcgggggtggagggagacattttctcagagtgggagaaaaataatgaatgaggtagccttcagtctctggtggagtgagtggccatgagcatttgaggcaacagccaaagatatgtttgggtaaaattctttccacctcgagagatgcgttttttaaaagatggttgaaaagaaaagaaaaggtgtccaaaatgtggttctcaaccctgactgcatgtcagaatcacagggggagtttcaaaagagtcccaatacttgcgcccaccaaactaattaaattagaatttattggggtggggccgaggcatgaagatgtttttctaaaaaaaagatgttcagatgattttaaatgtgcagccagggttaagaaccactggcctaggcaaacatgagcctgtatcacaatcacctggagagcttcttacaacacagagtccttgtctcccacacccagagtttctgattcagaaggtttggggttggggctgaaacttacattgctaacaaattcccaggtgttgctgatgctgctcatcagagaccacatctagagagcttgtcctagaacagtggttctcaactgggagcaaattttgcctctccacgccctatcccccaccagggggacacacatcaatgaatggagacattttaggttttgtcacaactaggtgagtgctactggcacctagtgggtagatccagcgatgctgctaaacatcctacagtgcgcaggacagtcccctccacaacaaggaattatctggcctcaaatatcaatagtgccaaggttgagaaatcttgctctaggggagacgatagttttgaagccattctgagaacatgaggctttggttcccatcaagcttagcatgggagcctgagtgaagatgaggatgccagattcttgctagccaaagcctggtcatagagcatggtatttgacgtcagaacagtgcgtatcctaatttcttctccacctcttggctctgtgaccttgggcaagttcctcaccctctctgagcctgggatgattatctataaatggggataattttcatttgcagcattgttacaagaggtaaaagcctsatgagtgaaagaaccacatgaatgttaagtactcaacaaattagagtaagaatcaaaaggacagtgtttctccacagacttctgtctctctagcagggaggtgctgtcccaaaagcccaccccaggagactcctgacaaaccctcctgggcccctaaagcaagtgggagccctcatccagaaagatcaaaacattgtctggacctttgggtccttgcaggatggatggggctgcttgagtatccccctgccctttgcctttacctcctctcatttgtttaacaaactcagcacatcctagtttggaagcaaagctcatggagcctaattaacattccccaagcttccttcgcatccctccagccttcacaattctgccatatccacattccacctgccatattattcttgtagtatttttactgcaatagactcgcctttatttttatgtaagcacattttattttaaaagtaattttgcatcatggccataagtggaaatcttgctgtcacttgccatgaggagacagcaacaatgcgaagaaatcagtgaaacaaaaacaatggcattcagtgctagccgggcactcctgttacctgctggagatgccagttctgggggcaggattctgctttttggaaaaggaagttcagtaggggagtgctgctgaagatttgtttgcattgacctgagagtttgctggtagggtattcaggagaggtgggtaagaattgaaaaaagattcacagtcccccctgactcaatgccattcgatgtgagcagcatgtgaatcctctcttgggtaactctgacatcgcatttaagaacacactgggcaaggtggctcacacctgtaatcccagcactgggaggctgaagggggaagatcacttgagcccaggagttcaagaccaacctgggcaacatagggagaccttatctctacaaataattttttttttaagatggagtctcattttgtcacccaggctggagtgcaatggtgtgatcttggctcactgcaacctccgcctcctgggttcaagcaattctcctgcctcagcctcctgagtagctgggattataggcgtgcaccaccatgcccagctcatttttgcatttttagtagagacagggtttcaccatattggtcaggctggtctcaaactcttgaccttgttatccacctgcttttgcatttttagtagaaacggggtttcaccatgttggtcaggctggtctcaaactcttgaccttgtgatccacccacctcagcctcccaaagtgctgggattacaggcgtgagccaccacagccagcctacagataatttttctaaaaaaattagatggacatgggatgcatgcctctggtcccagctactctggaggctgaagagggaggatcatttgagctcatgagtttgagaccagcctgagcagcatagggagacctggtctctacaaatatatatttaattagccaggtgtggtgttcatgcctctagtcccagctactcagcaggctaaggtaggaggatctcttgagcctggagtttgagactgcagtgagccatgatcacaccactgcactccagcctgggcaacagagcgagatcccgtcttacgaatttaaaaaagacaaaaacaaaaccacaatcgctatagtcctcaggatcaggtccctgttaaacactctccagccatgtgattagttacaagttcaagtgtgatgggcgaggtccgcggagtcacaccacatgaactcctccacaatcaggctgtatggctttattttgcctcatttatagctgtgcttacagcatcacttagaggtgagttytctttgacagatgaggaaactgaggcatgagaggcaaagtgacctcctaataaatggtagggctgggatgcagacccaggctaaccccttctgtggaatagctgagttaggaagtgcaggatgggctcctaaaaataaaacattacaaatagtgactttatgatccaccaattccatttctgggaatatactccaaagaattgaaacagtgactcaaacaggtacttgtaacccatgttcagagcaacattattcataacagccaaaaggtgaaagccattcaagggtccattgacagatgagtggatcaattgtgctatatgcatacagtggagtattacttgccctgaaaaaggaatgaaattctgacataggctacgacgtggacaaaccaggagggcactgcgccaagtgaaaggatccagacacaaaaggaagaataatgtctgatgtcacttacatgaggttccttatcaaattcatagaggcagaaagtagaatgaagctttccaggagctgaaggaggggagagtgggaagttattgttcaatggatagaaagtttcagttttgcaagatgaaaagagttctggagatggatggtgataatagttgcacaacagtgtaagtatatttattatactaaactgtaaacttaaaaatgcttaaaataggccagatgtgtctcatgcctgtaatcccagcactttgggaggccaaggtgggctgatcacctgcrgtcaagagtttgagaccagcctggccracatggcaaaaccccatctctactaaaaatacaaaaaaattagccgggcgtggtggtgggcacctgtagtctcagctcctcaggaggctgaggcaggagaatcgcttgaacccgggaggtggaggttgcagtgagccgagattgtgccacagcactccagcctgggtgacagtgagattccatctcgaaccaaaaaaggctaaaatagtaaattatatgttatccatgtagagcatccttaattcaaaaatccaaaatctgaagtactccgaaatccagaacattttgggcacataatgctacaagcggaaaattctatacataaatgcttaatgcaactttgattaatgcacacaattatttaaaatattgtataaaattactttcaggctatgtgtataaagtgtatatgaaacagaaatggattttgtgtttaggcttgggtcccttccccaaaatatctcattacatatacacagatacttcaaaatctgaaaaaattcaaaattggaaacacttctggttccaggcatttcacataagggatactcagcatgtattatcttggactacaacttttttttttttttaaagagaagtgcaggatgttcagaggggctgtgacagggaactcaaagaagggatgggggccaggcacagtagctcacacctataacaccagcactttgggagkctaaggaagggaggattgcttgagcccaggagtttgagaccagcctggacagcatagcaaggcactgtctctaccaaacatttcaaaattagcccacatggtggtggtcacctatagtcccagctacttgggaggctgaggtgtgaggatcccttgagcccagaaatttgaggtggcagtgacctatgatcatgccactgcactccagcctgggttacaaagcaagactcaatctctgaaaaagaaaaagaaaaaaaagtcattaaaaatattttttaaatgaagggatggggaagagagtcagggagggcttcccaaggaagggtcatttctcctgagacctgacaggtgctggcttggccaccttcatccttggacctatgttctttcagctcccctctgtggaccccatgacccccagttcacatcccctccacccctctcttctcattaagctgggtgggaggggacctggtggccccgcatgagcagcagctgcggtgcagagcagtctgggccgttgactgattcctcccagcggggcttggtgctgctgagcaagggtccacagaccacccaaaagcctcaaggaaaagtgggggtgcctagcctccakccagtttgctggatgagaggagacagccatgggcaacctctcaggcctgagtcttcaactttgccccctcatccccaccaccgggaccctgtatgtggatgaagctgtctggctaaatctgtcagtcagaaatcattcattgaggcctctcccccaaacttagctctgtaccaggtccaggggcaaggctggcatcctacaagagataagagcatgaccttggctcatagggaacgaactgacaggtatcaagagaaccaacctgggctaggcgctgtggctcacgcctgtaatcccagcactatgggaggctgagacagttagatcacctaaggtcaggagttcgagaccaacccagccaacacggtgaaaccctgtctctatcaaaaatacaaaaaatttagccaggcgtggtggcaggtgcctataatcccagctactcaggaggctgaggcagaagaattgcttgaacctgggaggcagatgttgcagtgagccaagattgcaccattgcactccagcctaggtgacaagagtgaaactctgtctcaaaaaaaaaaaaaaaaaaaaaagaaagaaaagaaaaccaacctgactctcaagggagtacagttctctatgtggcaatgctaactcctggatcgggttagaattccagatgattcagaaatttccagaaatatccagaaatttcatctccctcatttgggtttttccaaaataggggttttggagtctggcacacccaagtggtggtttccattctcgcaccaactgctaacatggcacctgcctcctgagaccttgggacaattaaataatgagatcacatttgactggtgcttaggccataatgagtgtttgtttatttctgatttatttatttttagagacagggtctcactctgtcacccaggccagagtgcagtgacaccatcgtagctcactgcagcctcgaactcctggactcaagcagtccttctgcctcagcctccagggtagctggaattacagacgcaagccaccatgagaagtatttgacgcaagcatgataagtatttgacatgcatctgatagcgttactagtctttgagattctacaggaccaaggaaagaaattgacttgcccaggcccccgtggctggttcacagcagaagcaggaatttgaatccacctcgttgctctttatccagtatgcttgtcgccacacagcaccgccttttctaaacccatcgagagcaggggattctttctgggcaccagacagctcccaagtttaatcaccagaaaacctcttttaaaatttcccactaggataaaggcatctcccacccagatctaacaaagaaccttgagcgtgcaggttttctcccccagtaagacgaatcccgctcctctgcaacgcgcctgctgccgctgtgaaacttttcctcatctgtgatcatgaatcaccctggaacccagcggggtcagagatggacctctcttcccactttgtaaatgaagaactgacaatcagagaggggcggtgtctttcctaaatccacacagtgcaaggttgcattctacaccccagctctgaatcccagtcacaccttcccaggcagcatagaagctgggctccagctgggagcttcctaacccaagcctcatttgcatacaaccttgtttccatgtctctgtgttcccaagacccaactaaccctcttagttggaagtaagtcagaaagtgccccttgcagcagccggaagcagccctttcagagtataaatagaatcgagggctttgttggtagagtaactattccagtcaagcagctccttcacatttgttattaattgtggtctgggcatacgctgcagagggaaattccggttgtagatgtttatttacaagcagcaggctctagagtacacacagccctgggagtcagtgcagctttgaggtagaactctggagctgggcctgttggttaaatcctgatcatcgtggatgagcagccacatagaaatgatggctatgacagtataatttattgaggatttrctagatgccaggcactgtgctctctcttctggatgtgaatgtccatgtggggtggattctgtgattatacatacccattttacagatcagaatactaaggcttggagagattgcataaaaggtccaaggtcattcacatctgcctgaccacaggtcatgttctaaacccctgcaccttgctttctcctcccaaatcattattgcaggacactgctaacatgatctttgccagcaccacaacagtggaacagcatgttgacccttgcaaagcaccttcatctctgctatgtctttggagcccaaggattacatagtcctcgtttgacccacaatgctgctaagaaatagggaatttgagtaacagaactaacacagcacagctatctactgggggagctctccgggaccccccatcatcctcagccttcacacctgcactgcaaaaatatacttgatattctctctcgataaacctggcttgttaacattcatctgaagtcagcttctcctgctgcctctaatcactctgatttttccacttattttctgttttgtgccatgggaatctgattacattgttaaattcttttttttttttttttttttttttggagctgggcactgtttgggttttggtctttcaaagagttccgtgttcataaagacccacatagctctgaccacatgtcattgttatatctgtcctgcagctgaaagctgacacatttcctctagggacggattttcctctttttgaaatgaggacagtttgattgagcatggtgaccatgacagggctctgggatcacagactcactccattctcagctcagctactttataactgggacctctccaagcctcagcttccttgtgcctacaatagaaagataatagctctgttttcatagcagttttgatagaaatgaataaaatcatgcacagaaattgcttaacacatagtaggcactcagtaaatggttgatctttctcctgactcgctgtcttccccctctgccccccatccccatccgcatctctatttctccttctctgcatgtctcctttctttagatatttttgttccttcccacccaccccttccccagaatagctgtactcagaagagctctgggttttttgttccccattctctttgcagctccccagactaactgtctgacccaaagatgactttatatttaagccaagggagctctcttgctggagtgatttgtctttgatttcacaggactctgccctttctccaaaagaaaagcatccatgtctgtgtctgtctgtaaatctgttctgccttttaaaactctaaagagaagttgtaaaagacctcagcatcaacatccaagccctttttaaagaccagcatagagtccttacacctatcctctatatcgcaaatctccacttctgcagagagcaagtggaaatatcagggctggctttggactcggcaacactcagcttcccctcccacctctgtcctcactcactgtgtgacctgggaaatgtgctgacctctctgagcctcagaggatgataacgcattcttcccagggtcaaataacaatggatgcataggaggcacttaagaaacaccagctcctctggatcagagcagccactcttcttcagaacacattcattaatttgctcattcaaaaactatggcaaaagatgttcatggctacagggaaaagcaagggttaatctcaaaggccccatacaccttaagtggatggatggtgtttgggatgataagctcttggaggctttgctggatgcatagttggagggtttgctgtatgcttggatggatgaatggttagatatggatgagtggacagatgagtagttagatttggatggatgaataaatggatgtatggatgaatgggtggagcaatggatgaatggttggacttggatggatgaataaatgcatgaacgaatgggtggatgggtggagggatggatgagtgggtggatggatggacagataagtggttggatttagatggatgaataaatggatgaatgggtggatgggtggagggatggatgaatgggtgggtagatggatggacagattagtggttggatttggatggacaaataaatggataaatgggtggaatggtggatggatgaatggatgagtggttggatttcgatcgatgaataaattaatgggtggatgggtggaggaatagatggatggatgaaaagatacagccttattaatcacctagaatcagcatctcatctaatacagaaatactggaatacctatgttagtccttaaatgcatgcctacctgcctgcaataactaacttacaaagtatttggttagcaacaagcaactaaaagcaattgttataaacttttccttccaaactctaggtatgatcatatggtgtgtattagtggttcagggcatgatctttggaatcagacctgtgtttgaatctcagcttaactaattaaagcagtgtgaccttgagccaatcccttggcctcttctaagctgtggtttcctcatttggaaagcggggataatagcattactttgtaggatcattacgaggattaaattatctaatgaacgtcaagggctggtcaatgctcaataaaaggtattgttattttactgatcccaaatgtgccttcctgtaacttttgtttcaccgagaaccagatgtgtgtcagatactgttcaagtgttgcagattctgtggtaaacaaggccaaaatagcccctcatctcttggagctaatgttctagtggtgtgttcagataataagcaagtaaacagataaacaattgcagacagtgttacatgctatgaagaaagttgaaatccggtgaggtgaaagagagtaaaagaggtgcgggtgaggtgaaagagagtaaaagaggtggtggtgagtcccctttttggactgtgaactaatgacaagaagatgcagccacgcagagatctggggagagggcgttccagatcacaagaagccagggagaaggtcctaaggcagaaatgagcttgtttgaggaagagaaagaaggccagaggacaagatggaatgtgagacccaccaatcgagggcagagagatctgagtagttagatcacaccagccatagaggctgtgtagtgtgatttggatattatctacgtcaatcttgtcttgtctcctggaactacgtagaaagagcctcgttcattcagcaaccattcagccttctgatgacagcttagactcccgatgtcctaatcccccagccccacagtctccatctcagttctcccggtttagatgctgggacacttgcagctactaccctgacaatgtcctgggtcccataaacccagaactcttaagaaattgggttggacccaagtgaaatcaggctgaggaaagctaggagatttctagttgggattgtaataaactaaactaggaagctgtgtttttatctgaagcaagagaaagaaagagaggagtctttgaggctgattttcggaataaaatatgtctgggactatttatccaagtggatgtggtataggatttggatttaaaagaacatgatagatgacagtgggtgatctgtagccttactgatgcaggagctcaaggcaggccacaagcacctggaccctcatccccccttggcaatgtactccacattagttttcttctcaggcaacctctctccgtgtgggaacagaaaggctcatagaatcttctagtctcctgtgtaacagaaaaagaacctctcaccgggcacagtggctcacgtctgtaatcccagcactttgggaggccaaggtaggcagatcacctgaggtcaggagttccgagaccagcctggccaacatgatgaaaccccatctctactaaaaacacaaaaattagctaggcatggtgttgcgtgcctgtaatctcagctactcaggaggctcaggcaggaaaatcacttgaacctgagaggtggaggttgcaatgagccaagatcgcaccactgcactgcagcctgggcaacagagtaagactccgtctcaaaaaaaaaaaaaaaaagataacctctcttatgtagtagttctaacaaaagtctagcattctgtcttattggttaattaacttggttgagtcatatgttcatctctaaacaatactgtggctatggagaatcagcattcccattggccaggcctaagctgtaggtccacccctgaaattgatgatgaagttaggtcttccccacccatatggactragaatagaggagaggaggatgatgccacaaaaggtattggatgatgaagtttcagtcatgcaggacaagtaaatttaaagatcctgctgtacaacattgtattaataggcagcagtactgtagtgtacacttaaacatttattaagaggggagatttcatgctatctgttcttaccaccgttaaaacaaacaatatattggatgctattagaagaagggagaatgaattctggacaggcaaaaacaacacatgtatcttacgttcactaactcgaaattaactgcttcttcctctgtcattcagagatacatctcttatagctctcacctcctcctgccttgttcagtagcttaatatgtgtccatgtgtctcttccagcatttttaagctcctcagaatggaaactatgtcgtaacaaccccagggtcccctaaccccttttgtgcctgacagtgtgagaatctaagatgtgctttgtggcattgaattatgttttaaggcccaatttgatgactgtgcccctaaaatagtccccaaaagaagcaccagagaaacttcccacccctgcaaaggatggcagagcctcactttctcctctctgttctcttggattttccccaggtaaagccaacaagaacgtgcagtgggacgaggactccgtggagtacatgccagccaacccggtcagaatcgcctttgtcctggtggtccacggccgtgcctctcggcagttgcagcgcatgttcaaggccatctaccacaaagaccacttctactacatccaygtggacaaggtgagaggcctctgtgatcaccccttgctgggctttcttcgggrtctgtccgtccctccctgataccctccttctgcattgctagtccagactgcctgctttcagaaaaggcttggaagctgaccagctgcctctccacagagcgtgtggccctagagtgctgtctctatgtgtgtgttggtttcaaagtttccagctgcgacttacaattttgtccataaatgataaatgctgtttttggggggttttttttcttttttttttgatggaatgtcgctcagtcaccaggctggagtgccgtggcatgatctccgctcactgcaacctctgcctcctgggttcaagcaattttcctgcctcagcctcccaagtagctgggactacaggtgcatgccaccacacccggctaatttttgtatttttagtagagacaaggtttcaccatgttggccaggatggtctcgatctcttgacctcgtgatctgcccgcctcagcctcccaaagtgctgggattacaggtgtgagccaccgtgcccggcccmtaaatgctgtttcttacctctcccctctacccartgccctctgcctgcctctcacatactttgtgggaatagcttacctttattagtccattttcatgctgctaataaagacatacctgagactgagtaatttataaagaaagatgtttaatggactcacagttctaagcagctggggaagcctcacaatcctggtggaaggcaaaaagcaagtcttacatggcggcagcaagagagaaaaatgagagccaagcaaaagaagtttcccggtgtaaaaccatcagatctcatgagacttattcactaccacgagaacagtatgggagaaaccacccctgtgattcagttatctcccactggatccctcccataacacgtgggaattatgggagctacaattcaagattagatttgggtggggacacaaccaaaccatatcactatcccaggagtgcgtacactttttctatggaaggcaagatagtacatattttaggtgttgcagggcacatagtctctgtcacagctactcagcactgcccttgtgctaaagcagccaaggagaacatgtcaacaaatgagcatggctgtgtaccaataaaactttattaacaaaaacctgcatcagccctgctgactcccgagctaccttgtccctgaggtttctattggtgaaacaattatgcctttagtcaagaaggcaaagggggaagtcttgtccaaaaggtcggcttctagcagacctgtgagaggataatggaggagcaatcagtaggagtggggacagaaaacaaaaattctgcctccgaaatatacatgggtttagatggagccatatttcccagcttgtcttcctcagaccccatgcagctgtcatgtatatgaatgcaaagttggccaggtgcagtggctcatgcctgtaatcccagcactttgggagaccaaggtgggcggatcaccygaggtcaggagttccagaccagcctgtccaacatggtgaagccccatctctactaaaatacaagacttagctgggcgtggtggcgcatacttgtaatcccagctacttgggaagctgaggcaggagaattgcttgaacttgggtggtggaggttgcagtgagctgagatggcaccactttgytccagcccgggtgacggagcgagactctgtctaagtaaataaataaagcaagactccatctcaaaataaaataaaataagataaaattttaaaaatgtgaagtcccaggcaccaccagcccaagcctagtgaaccattagctcagaagtgcggccagtgaatctgcatttcaaatagctaatttgaaatgtaaaaaataatccaagtttgaattgcagtacagaaagacactccagtccaggatcatttacttggcaaaggccactgtgctcagaagtgcccaaccaggagggaagacacagagaggggacaggggtgaggggcatgcctgggtattttctaggccactgactgtcatcaccctttctctcctgggaaaagcgctctaattacctgcatcggcaagtgctccaggtctccaggcagtacagcaatgtccgcgtcacccyctggagaatggccaccatctggggaggagccagcctcctgtccacctacctgcagagcatgcgggacctcctggagatgaccgactggccctgggacttcttcatcaacctgagtgcggccgactacccsatcaggtaaggcagccaagggccccaagccagtcttgtctgacgtcctgctctggctggtcatggctgggaactcacgaggcagaaggagactgatgcatagtctccacaggatcgctcaggataggattctgattggacctgagaatcattgattcattcactcattcattcatgcattcaacagatasagactgagcacgtggttttcccagctctattagctgatatgccagtgcactaaacagacggaaactccaacccgcgtggagctttatattagggttctctagagggacagaactaacaggatagrtgtatatataaagaggagtttattaaggagtattgactcacacaatcacaaggcgaggtctcacgatrggccgtctgcaagctgaggagcaaggaagccagtctgattctcaaaacctcaaaagtagggaagcccacagtgcagtcttcagtctgtggtcgaaggcccaaagatcccaaagctgaagaacttggagtctgatgttcaaaggcaggaagcatccagcatgggagactcagccagcttattccttccacgttctgcctgcttttattctggccacgctggcagctgattagattatgcccacccagactgagagtgggtctgcctttcccagtccactgactcaaatgttaatctcctttggcaacaccctcacagacatggccagaaacagtactttgcatccttcagtccaatcaagttgacactcaatagtaaccatcacaagcttccattcaagtagggagacaaacaacaaaataagttaaatgatatcttagaaaaataaagtaaggggcaaaagtaggggacagttgtaattttaccaacggtggcctggaaggttttcacggataagaacagaagaagatgaaaaagagagtcacgcctacagagaaagtggtccaggcaggggcaaaggcaggggctgagcccagaggtgggtccatgcctggcctgtgcgaggaacagcagggttcagtggagctgtaacagagtaagtgaggggtagcataacaagagagataaagtcagagagtaatttgaggccagatcgtggtgatcctagaatttggctgttagtccaagcaagagggaagccactggcatgatactttgaatgatattctgaacggtatatatatmtatatatatatatatattttggagacagagtctcgctctgtcacccaggctggagtgcagtggtgtgatcttagctcgctgcagcctccacccaccaggttcaagtgattctcctacctcaacctctgaagtagcatagagatggtgtttcaccatgttggtctcaaactcctggccccaggtgatccgcctgccttggcctcccaaagtgctgggattataggtgtgagccatcgtgccaggctgttattttctcttgagagggcagctttttcctttgactgtgttttccatctggatttgctgacaagggtgaaaaggaaagtggatgggggtgaagagggggatcttcctccctctgatggcatgaggccatagggttcagcattcccaggagacctagatgaaggggtcctaaaaaaataaaacttttattaaggcaactttcaaacatgcacaagagtaccaagagaatagtgtaatgaactcccacgtggatgtcacccaggttaattcatggccattgttcttgtatctggactttcatcctcttcccccaacagtgggttattttgaaagaaatataagatatcacagaattgtatctataaatatttcagtatatatctagaaaagataagatctcttttttaagacagcatcacaatgatgcttatacctaaaatattagcaggcatgttttaatggcatcaaatatctaggtcacatattcccaagagtttgagttttgaatcagaacccaaacaaggtacaagcatggaaggaagacctacctctctttaaagctagaagtggctgctttcttcttcacagcttggtcactgggggtcttcttcattcctaggcttgggggcatcccaccatctgctgggagaccctagactgcagaaggtactggggaggcacaatctctggtcagtttgaatggggtacacctgacatccttgaacctgagaaaaatgacaggcactagaaagacaactgttttcttttgtccataagacagagggataaacgggaatggttatagaacattgctggtagaattttacttaccacaattttgttcatttgttcaacaaacatttactgagcaactaccgtgctacattcgaagtagtgcattttgtgaacaaaagtgatgcagcttcctgtacttctcctctgctcatggaatgtgtatcctagctgagaagatggagttagatgatcatgccaaagatacatcatgcaaggtgtgaacaagccataaagcaaggaagatgtgggccgggtgcagtggctcacacctgtaatcccagcactttgagaggccaaggcaggtggatcacaaggtcaggagttcaagaccagcctggccaagatggtgaaaccccatctctactaaaaatacaaaaatgagccgggcatggtggtgcgtgcctgtaatcccccctacttgggaggctgaggcaggagaatcgcttgaacccaggaggtggaggttgtagtgagccgatatcgcgccactgtactccagcctggcgacacagcaagactctatctcaaaaaaacaaacaaacaaacaaaaaacaacaaaaaaaaaggaagatgtgggtgtggagaaaaactcgagggccataagcaggaggtcagaaaggcctctgaatattcagctttgaaccgagacctagaagacaagaagggatccattgggagggaaataagaaagagatccttctatactgggattcctagcagtggcactgctgatgtttggggatggataattctttactgtgggtgccatcctgtgcattgcaggatgcgtagcatcatctctggcctctacccactagatgccaggaacacaccctgcccacttttgccaaccacagatgtctccagacattgactcgtgacctctgggagctaaaattgtctccacttgagaatcaccgtttcttatagagggaacagcctgggcacaatgtagcacagaaacaaacttgttgcgtttgagaaatttaaacaatggatagagtataataaaagaatgaggagaagtgagtttagacaagtacatggcaaggaggggttagaacattccctctccatcttccatgaagggaccgagtttggaaatgtcccaaaatgctgagcatagcagctagtgtggcagacacttgtttcaacccttacaacaaacctgttttacagaggggcaaactgaggcccaatgtcatgtgatgaatgcatggcagagtggggattagaaccagtttcgtctggttgcaaagttggtattccttctggcttttagtcggcctcttagggaaatcagcagaactggactggcaggatggccccaggccaccttgaaagcacagaaggaaacagtcccaccccatgagcttgtggcggggtggagtagtggctggactgcctgcagcagggatgtccaggatggtcctgggaggacccccattgtctgttcctcagtcttaggggctgtgctcaaagttcccacattcttccttctctggattcccagtggaggcctcagaggtcatgccagcctaggttgggggcccgcattaagcccaagaccacttgaggccaggtaggcatgcgcattgctgccccctagaggccattgttggcttgctttgcgtggccacctcccctaaagagtccagctcggctcagcacccgggagggtgagtgcctgcactctcgtcaaactgcttacggctcgaatctgagttctgccacttagctagcagcgtgaccgcgggcaagtaaatccaatttctgtgaaatcaggatacaataatagaacctagcagcctgccggacacttggaaggtgctccatgaatgtcagccatttatacgtaaggtacatccaaggtctcatcttgtatctctgagaggcccagaaatcctttctcaggccatgcgtgcaacctattttggggttcagaaaagagagttgtcttatttgtggcttttttgctttagtgccccaggtcactctgtgtctcttggcctttctcatcatcttcctctacttcactgatctcatttccatggtgcctcccacgaattcctttgcccactcttctttgccagcctcatagccagaggcactttatgcatcaagcactgctggttcctcttgctgttgttttcatgaagttgccctacacaaaaacatatgaattttgcagatgaatggtttcatcctgggcaatgctgataggttttcagtttccatctgccgccccatctgtagcttccaaaaccactacttctcccatcccagaaagaatgagcaaacttaggagtcttctcaaaggggcggtagtgcccaagtcaggcacttctaagaggcactgaaaacttgggggatacttaagggtccagccagcccgacgtagccactgtgagctgctctgtgatttgacgtcacctccctgtgtcccctgcacaaccctcactgtggggggtgggggggtgtgggcagattcttcctctcttagatattaaagatgcactggtgtttactggtcactagccttgtttaggccctggacgcagacatcctggtttcagattctgccccaccaccaactgggcaagttgcttcaactttctgcatctcaaattctctaccttaaaataaacacaatattagtgcctatttcggagggttcttaggaagtttcaatgaaatcttgcatgataaggacctaccacagcgtctaatgacagaaagtggttgataaatgcccaaattactccatggctataagtaactgtgggacttgagttactttcccttttctctttgatagagttaaaagagtagcaaagtatttcttgaactcacatctctgtcaaaagagggaaaagtgggccaagcacggtggcacacaactgtaatcccaggactttgggaggccaaggcaggtggatcacttgaggttaggggttcgagaccagcctggccaacatgatgaaaccccgactcwactaaaaatacaaaaattagccaggcatggttgtgcatacctgtaaccccagctactcatgaggctgaggcatgagactcacttgaactcgggaggcagaggctgcaatgagccgagatcgtaccaccgcgctccagcctgggtgacagactgagackctgtctaaaaaaaaaaaaaaaaaaaaaaagggtgggaaaagcaaagatagaygtgagactgtttcaagaaaaacagaatagatccaattcacttgtggacatgaagaatattcctgaacttggcatacgcaagctgagagtgtttagagactctaggtgctcctgctctgctgttgacatgacrtcctggtccacgtaggctccagctggagctggttgtgtacccagcaygtggatgaaagtggaaaatggatactttcaaactctgaggccctgctagatcttgaatcctcgaaaggtatgatggttttattygtatgttctatttaccgaggcaaggaattatacctggcctactttagattggctgcaggaagagatgaagccaatagcactttgccctgtttcttggcttggacttgtagtaagagacctcggctgggtgtggtggctcatgcctgtaatgccaccagcactttgggaggccaagatgggtggatcacctgaggtcaggagtctgagaccagcctggccgatatggtaaaaccccatctctactaaaaatacaaaaagtagctgggtgtggtggcgggcgcctgtaatcccagctacttgggaggctgagacaggagaatcacttgaacccaggaggcagaggtggtagagagctgagatcatgacattgcactccagcccgggcagcaggagtgaaactccatctaaaaaaaaaaaaaaaaaaaaaaaagagagagagagagacctcacgcctcacactgtgtcttttcctaagtccggtgtcttggggcaaatcagatgtaaagagaggagggttgagtgtgtccttggcccctcccggggttcacattcagtctgtggtgtgtacacacgtttgcacatgtggggcagtgtatgtatacagaaaccaggcaggggaaaccatgttgacattttcctgctacttctgcctcttgggtatccacatcaacaaagtccaaactatcagggcccaccacatggacatgtaagttacattaactgcagatccaaatgtctgtcttgagatactaccagagccgcaggctgagaacatgagagagctgctccatggcgcctcagtaggaaacaccagctggtaaagacaggaacaggtggccagggcttctctacagtctcccgaagaccagagtttatatgggaccaattgagcaagactaacccccagactaacagagcagacacttactgcacacctactgtgtgctgggccctcttcagggccctttaccacatatttcttcttaatcccatcccccaaaacacaactgctacttggtaagtaagtttagagaaattagtattaacacagagcagaggaagctttgcagggaagtcaagcccttgataatgttcagcacagatcccagtcactctgggatttgaaatgaagatgagcagtatggaagtccaagcatccatgtacagtcactgcatctgcgtacagatcacatccctttagtctgctaaagtggaacccgaataggtcaaagaattcctgtagttaagaccgcacagcaaccacagcaaatgtatatgtagcacttcgtacattcctagcattattctaagtgctttacaattcagggatgtctgagggagagaatacagttatggctcctcagtttcttttcttggttgggccagtaaagccccttcctcatccctcttttctgcttatcactagagacagaaactaaaaaccatggcttcaggctgctaaaagcctaaaacaaaaaaacaaaacagaacaaccaaataaggcagggttggacaagcttgtttacatcgttttgacaacaactctgamgtatgcactcttgatatccccatttttcagatgaataaactgaggcacagagatgttaagaaacttgaccccaaggctacagccagtaaactgtagaatcatgatcctttttttttgaaactgaggtgaaatttatataacataaaattaaccatcccattactgggtgtatacctaaaggattataaatcatgctgctttaaagacacatgcacatgtatatttattgtggcactgttcacaagagcaaagacttggaaccaatccaaatgtccatcaatgatagactggattaagaaaatgtggcacatatacaccatggaatactatgcagccataaaaaaggatgagttcatgtcctttgtagggacatggatgaaggtggaaaccatcatycttggcaaactatcgcaaggacaaaaaaccgaacaccacatgttctcactcataggtgggaactgaacaatgagaacacttggacacagggtggggaacatcacacaccggggactgttgtggggtggggggaggggggagggatagcattaggagatatacctaatgtaattgacaagttaatggatgcagcacaccaacatggcacatgtatacatatgtaacaaacctgcatgttgtgcacatgtacctgaaaacttaaagtataataataaaaagaaactgaggtgaaatttatataacataaaattaaccactttgaattgttgaatggcattcagtacattcacagtgtcaggcaaccgtacgctctctaatcctaaacattttcatcatcccaaaagaaaaccctgtacccattaagcagtcacttcccagaaacctctcctcagtctctggcaaccactaatctcctttctgtatctatggacttgatttgcctattcttgacatttttatttatttattttgagatggagcctcccctcttgttgcccaggctggagtgcaatggcacgatcttggctcactgcaacctctgcctcccaagttcaagagattctcctggctctgcctcccaggtagctgtaattacaggcatgcaccaccacacctggctaattttgtatttttagtagagatggggtttcaccatgttggtcagtctggtctcgaactcctgacctcatgtgatctacccacctcagcctcccaaagtgctgagattacaggtgtaagccactatgcccagcctattctggacattttatatgaatgcagttacatagtatatgacatttggtgacctgcttatttcacttagcttaatatcgttgaggttcatctgcatcgtagcatgtggcagcacttcattcctttttatggctgatattctatcatgttgatatacttgtaccacaatctgtttatccaattatcagtcaatatactcagcattctgaagcttcccaaagcccctgtctcctggccatgttgtatctgcactgtatgccctgaattgaggacctcatctggtttaagaagatgcagctccatcatatgggactctgcccagcagtggtgctggaggactcttgttaagcaagccctggtgactgtttggccatggggggttgtagatctgagcatattggcctgatggcctttcccattcacaccggatcttctctacccatgctagcccctggacctcagytgaacgggaaagaaacttcagtgattctcattgtccggggaagattcaggttgaagatggaaatgtggaggagtagagtgtgaggtccaagcttccctttttcccttcytccttctctcaacaccaagccccttctgatgacaatcttggggtgctttgaggaggaaagtgcttaggtcagcccagtgaagatacttctctactcccacagatgagttcaggagacagggctccttctgactttacccattcacccaaaaaaatatttattgagcacctactatgtgttggacactgtgctaagcagcaactcaaaggtgaggaaaaacatatccagccctgccctcatcgtagtggtcaagggtacaggctggagccagtccacctgggtccaaatcgcagcttctttatttactagctgtgtgaagttgcacacagcagtccctgtgcttcagttacttcatctgtaaaatgggcataataatggcaccaccccatagggttgctttgagggctaagtgagtccatatatgtgaagtgcttagcacacagtgagggttatccatgtgatagccatggttattaatagaggaaggagacagacattaatcacagagatcacaggagtgcacatatgacaaagtcaggcaagcattgtgaaaaaaaggaatgaaggatctatgagcactttgcaaaggaatctcacatggactgagggcccggatggcttccctgaggaggcagcctgtgaactgagatgtagatgctgggtaggagtttaggagaagtgtgaggaggttccaagcaggcatcccaggaagagggggtagcttgggaccctggcatatctgaggatctgaaagaaggcaactatgggtgaaacataagaggcgagggtttgccttcttacaaatgaggtaggtcgaggcaagcccatgtgggcacttgagatgtcctgttgggtcactaaagcctcagtctgtgagcggtgaggttttaggggagagtgacaatatttgccacattgagagatcgtacyggctgccgtgggagaatagttgggagtggggcccaaatgggagtggggaggccagatcacaagcagttgcttctactgaccccagagccacatccacagagccccctattctccaaacctccaggcagaagcaggtgtcctagaaggaagccataaggagcttcctgaacccaagcagccatgaagtcttttagtcacwcagagccaggcagccaccttctgtttggggaccaggaccccacacctgtgcaaaacagcctcgttcaggagactcagaggatttcaacaggagctggagcagagaacagagaagcaagcgtgagatgcaaggatcttaggagagcgggtcagaaaaaagccaatcataagccaacaggggcgcagccagaggattagaggaagaatgtgggttgagtgaatgtgagaaagaatatggtggagacccctctttgtcttttgttctttttttttaaagtgataaaatatggtgagaatgataaaataagtgagaattgcttgaacctgggaggcggaggttgcagtggactgagatcacgccattgtactccagcctgggcaacaagaccaaaactccatcccaaaaagaaaataagaagaaagaaaagaaaagtgataaaatacacttaaaataaaattgacctttttaatctttcttttttttttttttttttttttgagacagcgtttggctctgtcacccaggctagagtacagtggtgcgatcttggctcactctaacctttgcctcccaggttcaagtgattctcatccctcagcctcccaagtagctaggattacagttatgcaccaccacatctggctaattttttttttttttttttttttttgaaactgagtcttgctctgtcacccaggctggagtgcaatggcgtgatctcggctcattgcaagctccgcctccctggttcaagggaatctcctgcttcagcctcccgagtagctgggattacaggcacgtgccaccatgcctggctaatttttttgtctttttagtagagacagggttttgccttgttggccaggctggtctcgaactcctggcctcaagtgatctgcccacctcggcctcccaaagtcctgggattacaggcatgagccaccacacctggactgattcttctacattttagaagaatccaaaatgtcttcctatcctatatcagtcacccttctggttcccccatttctctgaataggaccaccctcctcctgagcacctgcagctggaagcctgtgtgcccccttccttgctgctccatctgcaccttgcgtattctcgttctaaccctgacatctctccgtgttcatccccatctgtgatgcccttcatccccacccaggtcagaccctcttcaccttacacctgcaatattagcacaggtgtgctctgacggggactccaaggtctcccaggagaagacaggctgagccagactcttaaaacaggatagagctgcttctcaaggccatttcctgagcacccgtcatgcgtcaggctatgggtgttccgcagggagcaggacagacaccatccctgccacaaggagcttgacatctcactatgtgcttctcagccgggtcaaatcaaggttctatgtgattctcagaaattcagagttcagcaggcgcagtggctcatgcctatcccagcactttgagaggccgaggtgggaggatcacttgatcccaggagttcaagaccagcttgggcaacaaagcaagacccccatttctaaaaaaaaaaaaaaaaaaattaaccaggtgtggtggtgcacccctgtaacgccagatacttgggaggctcaaaataaagaaatcggctgggcatggtggctcacgtctgtaatcccagccctttgggaggccaaggcaggcagatcacctgaggtgaggagtttgagaccagcctgaccaacatggtgaaaccccgtctttactaaaaatacaaaattagctgggtatggtggcacatgcctgtaatcccagatactcgggaggctgaggcaggagaatcgcttgaacccaggaggtggaggttgcagtgagccgagatcgcgccactgcactccagcctgggcagcaagagtgaaattccgtcttaaaaaataaaaataaaaaagaaatctagagttccgttccagatcaactgaatgtaaattccttgtggatgccaagaatcaatttctctctctctctctgtgtatatatatatttgagatatttgagatagagtcttcactctgtcacccaggctggagtgtggtacaatctcagctcattacaacttccacctcccagttcaagtgattctcctgcttcagcctcccaagtacctgggattacaggcactctccaccacatctggctgatttttgtatttttagtagagacaaggtttcaccttgttgtctaagctgacctcaaactcatgacctcaagtgatctgcgcacctcagcctcccaaagtgctaggattacaggtgtgagccactgcacccagccaagaatctatatatttttaaagtgtccagcaccctgcaggtgattgtactagtgagaattgaaatccactggtccagggagagagagagacatctttcacatagttagaaaaataaatagaagctacatgctgtgttggaaaatgttagcctcagtacttcgtgggaaagcatacttggtggcccaacactcagatatttgggtgtgaccatctcccctgcattctgctttctcagcatccaaaccacttttgttctttgggacgttcagagacacacactctgcttcctgagaccccaaarttcctgggttcgaaaccatccaayaaaacctccacccagataatgtgtgagtttgaaagggtgtatctgctcggactgttgttcacaaggagactggaaaaacatgccagtaattatgccgttaacagttttgtttgcctctagtcacaaaataaacatatcctcagccctgttatttttcaggctgatggagcacacactcctgcttttgcagaaatgcagtttgcttccctcttgccagttgtcctgggtctcctgagctgtattttaggctggtcagctctttaagccttcttaaggccagaagtgacctagaccatcggctggacaaacagagtgagcctagagttctcggagatctcatgaaaaccaaggttctgcagaaagccaagagtggtctatgggcttaggaccttctgggaaggatgtggtggaagacaagaattgaagtgactgcttcacccaagggatgccatcatctggcttaaataacttttagttgtattgtttgtttgcttgctattttgtttgctttctctttctttcacaacggaaaacaaaaaaaattcagagtcctggggaaaaatgtgatagttctctcttgagttgtgtatcccttctttggctagcagagaatagagcacttggccattcatccattcattaaatagatgctcattgagattctgctagatattaggcaatgctctagaccagcactgtccagtggaactttcgggggtgatggaaatgttctataagcaccatcctgtatggtagccgttagccacaggtggccattgagagcttgaaacgtgccttgtgggactgaggaactaaattttcaatttgatatgattttaatttaaagttaaattaaaactgtgcgctcatgaaccttacatcgatgccatggggtacaaacacttccactagagagaattatactactgttaccagaagaaaagagagtccaggctaaatagtacagaaataaatgtggtctctgtcctctgccaatttgatattctcaccagatcccagcttgaccacacaatgaattttgcaatgtattttctyccgaatccctccctctccagayctcacaattctccttcctcttggcagcggctctctatgtgtctgtggatgggacgtttccaaccctggcatcttcctgcccagtgcattgagcatttttgcttattggcaaaaaaaaaaaaaaaaaaaagccgtcttttatgtgactttttctccggtggccaagagtatggacggtatccatgctgggatgctccaagtgcatcctgggaatttggatgtgagcccggggtggtctacaatgtgggtggtctttattgtagagtctattattcttcccttgcctgttccttacatctaactgcaggtgaagattcttttcaagggcaatctggaggaaccgcatgtattaaaagtgggataagggaggagcgtttctacccttttaaaaattgatgagggcaaagatttgactgagtataggatccaagcgacagggttaaggtctgatcattaggcacacagacggactctgtggattattcttattatcattcaagtattttctctcccttgctcccaccctgagtcattgtccagcatggtcaatagtagccactcaaagtagatgcctgggaaagccttttaagacctgccatactccagtagctaatcatatttgctgacatttcttgactacttactgtgcataggattctaggccaagtgatttccatgcattatctcatgtaattctcacaacaatcccagaaggtagatagtgttactgcatcgcagtatgaagaaaccaaggctgtgagaagtaaagggattttctcagtgtctcacaactggtgggggttggagccaggatttaaatgcatgcttctttcatcacggggagtaggggcagagaggaaaggacctgagttttttgccaaygggtcataatttcacctgctggatagttctggggtaaagctctctcactcatttcttccccatctaaatccttggtttctgtatctggatgagaatccaggaggcagagttgtccacgtatcaagagatgagcagggtacatcagaacctgagatccagagtgacctaatgtttagccaactgccaagttgcccccactttctgctttagtccccatggcatcccagtaagatgacatatagaacagcaccaggactcagagtgttcaagtgacttgcccaacgtcacatgacttgatcgtggccaagctgggatttgaatgcaggcttagctgaccctgaagttcaccatgctttatgcagtgtgttgtgtaagtggttgaccccagggagggaaagccgatcacccaaggatgccaacactacgatgtggctgccaaagccaaaagccagtgtagacccatctccagatggtctctttctttctctaatggaatatccaagctttactgactgtgtgctctaagcatagacctaggaaccatctgtcctgcgttagcaagaacaaccccaaccttcaaattcctttgtaatcctgttcccattggacctcagactctccatatctctaccctaactggctatctggtggtgcccagtggaattctcattcatttaaatattagcctaatgcaagcataattagaaaggaatggcttctgtccctccccccaccccaccccccacatatgcctaattgtttcaaagcaaaatcaaagcaaactcaaagcaatgctggcatattctacaccatcaagtcattccactacgatgtagaagaggccatgcaatatcagcctgacctggatttgaatcctgttgctatagattgaaccgtgccccactaaaatttatatgtcgaagctctaacccttgtacttggagatagggcctataaggaggtacttaaggtaaaatgagatcataagcatggagccctgatcctatagaaggagtgtccttctttataagagacaccagagagctcgctctctctttctctgccatgtaaggacagagcaagaaggtggccttctgcaagccaggaagagaggcctcaccagcatctaattgacaggcactttggactttccagtctccagaactgtgagtaaataaatctccattgtttaacccacccagttatggtgtcttgttatagcagcctgtrcagaccaaggtacctgtcctcatcccctgtatgagagctatatgctctcaagcaacaaatccaacctttgtgagtctcctttttctcacctgtgagagggcatgaccatgctacccatcagggagcggtaaaaggaagaatagccaggtgggactccaggtactgctttatttcaagctgtttgatgacagctaggtcagagcatggtggctcaggtctggcagctccatgtgacctcctctccaccttctcaccatcaaaacattgggaccaggatgcttggtcatactgatggatacaaagcaaggagagatggttgaatccaccagggagaccttagcttactgtacccaccccgttgcatcaagcggttggggtaactcatcgtggccccaagaggcttaagtaccacccaggcctgaggcaagaaacattaaaaaaaaaagaagtgcaattcatttgggaggaggaagggttcacagaacagatatctagcccactaataaccatgtctcaagcaatctctccagcactaagtaatcctaccctcagttcctccctttgggtaaatgtaggagagagatgggcagaggagaacctgctatgggcagcaggctagagtgccctccccagggtactttcctcataggattgttagaaacatgaaagatagtggaacacaggacctaatccggaattgggcattttttaacaaggaaattttttgatgataatggtagtgatgacaatgataattaataatcctgtatagttattaattctggacaaaaacatggtctggccttgtgtggtcactttccttattctctccttctttcttcctcttatattttatgtctctattccttgtactaatacagaaatgcagattgggcagggggcacctgcctttgaggaagtctgatcgtgatgagagtgaggaaggtagttgccttgagctgagccttctttgcctgtagttgggcccccatattccctccctgctgcaaggctgtttgaagacagccctagtgtttaytggccttctctaccccaatgaggtgaaacaacatattccatttctcaagtccatttctccacttactttgaaaaatcaagtgcatttctccagttactttttgaatgcaactgcaatctacctgaaatttcaagtgggaaacttccttccaattcccagcctcaccaaccctcaccccatccccatgctcaagtggcctgcctctgaccctcccctggkggccccaggcaatatcagaaagtgatttggacatctgggcaggtcagcttcctaggaaatcatcatggaacagaagccaacgcagagagcaaagtcttcatggttcatgagactcccctgctgcctcctcccactcccactcagcttaggtgaagcaggcccatgaaggtcagatggagtgtctctagaacctggaatctagtcttggcccactgcctataagaccagttaatccaaaagtggagaatgggaaggggaaggccatttggtagtactggccagttttcccatggtagggggtgaaggggaatcccacaatggtggttgttcccttatggagaaggaatgaaaaactgtgcccctaaaagccatcacccgtctcctatgtcctttctcctccagggagggattctcctcagtgcaatttaattgtattcatcagtcaacattacttggcaaaccgagccaggggcacaaacattgccaccctttctcagtctaatcatgctcttcaggatgccggaatctggtttaaggccaagcagaagcaatttttgattacagagtcaatctttgtttaaaatttgccaccctggggaagtttccaacaagttactttaaacaatgcattctctggacacctacagctaaatagtcccattaatccaaattgctttgctgggttgtggtgcaaccattcaggaattggggcagtgtctcagacaggcttcatgacagtgatggctgcagtaccaagggggcactgctttgtcatgaactgagcgaccgggagatggccccacccctgagagttccctgccactgagtttctgcaggtgctaagtgcttcttctatgttctcctttaatctctcagccatctggtgagatgggaccttcattgtccccatttgcaagagaagggacttgagcagatgctcagctacccagaagtggagctcagtggagcttaaacccacccatgtccttaacaatgagtcaggacttcccaagtatggcctgtgggccgcttgcagtatgtaagatgatttaaagagaaatgcaggcgagtctttgaaaatgtccatgtttatctatattaacacatagaagggaataggaacatgttcagyccagattttggaagctgaagtttccttaaaaataaaaagtaaataaataaataaaatgaaagttgatttaaatgagaaaatattaacaaggcaacaatacaaggggtaagtggctcttcagtcatttggcaagtacttattgagtgcctggtatactccagccattttgctgggggttgggaatatggcagtaaagaaagcaagcactgttgtgcatcctccrtgctcattagagaaagagacagtagataagtgagcgggtcatatatcaggtagaaatgagtaccaggaaaactattgcatggaaagaggatagggtgggtcaggaagacacttcgattagacggatatgccagaaagttatgaggaagattgtgaatgacccaaaaaagagagttatcaggcgagggatcaacaaacttcttttctagcttttatttgaggttcaggggtacatgtgcaggtgtgttacataggtaaattgtgtgtcctgggggtttggtgtacaaattactgcatcattcaggtgataaatggagtacctgatagtttttcgatcctcaccctccctgcctcctcaaggagaccctggtgtctacccttcccttctttgtttccgtgtgtactcaatgtttagctcccccttacaagcgagaatatgtatttggttttctcttcctttgttagttcacttaggataaaagcctccagctccgttcattcaacaaactttttttttttttttgagacagggtctcattctgtcaccctggctggagtgcagtggcacagtcacagctcactgaagccctgacctcccaggctcaagtggtcctcccatctcagcctcctgagtagctgggattacaggctcatgtcaccacacttggataatttttgtatttttgtagagacagggttttgccatgttgcccaggctagtctcaaactcctgggctcaagccatctgcctgcctcgagctcacaaagttctgggattacaggcatgagccaccacgcccagcctcaaaagtttttattaaaaggccagatagtaaatattttaggttttgtggtacatatatgtctctcaggatgacgaaactctgctgttgtaatactaaggcggccatagacagtatgtaaatgaatgggtatgactgtgttccagtaaaattttctttctaaaaacaggtggcaggcaatagtttgcacttgatcattctgccagatctcccatgtttcagatcgtggccttgcccagaacacgtacatctcagccctttcaaatttagtgccaacccactcacccatcttcctaggcatggcctttgcttcactatcttagatgattctgtcaacccaggtggggttgaatctgaatcacctcaagtgcttcagacttcaggaccctggatagagaatgagtgatggagatccccaaggccttctgctctacctcccctaggccttgacctggatttctacccagtcctgggtagctgaaccccttattaaacagcaggctccctttattttatgttcccctaacctacttcgtgtgccatttctgaccttgagctggtaaggagcacatgaaacacagctcacccatcagtgttgcctgaccaggggcggccgagaggagacaggcagtttgcacacagacagtcctccatggctatccagccccgcagagttcctgccagccagagcataccggttttcttaccacccagccttctctgcctaaacgcaggataaatacctggtcctcattagcaccgtaattcaccctgcaccaccttcctcaatctgaatcaaaaaggttaatgtcattgaatcctgagactcgttgatttcagcacttaccccaagtttctgctcccccgctaaaagcacagagctcgtttatctttccttggttgaccaggcaagttgctgactaatgccttaatgccagctaattctcaaagatttcccagagtgactggacatgtgttcctctagtactttctataaatccagttgatcttgtgtgtctggttttctactgactcactgcctggatgtgtctgggctcccctcctgtaatttatcttggaagtctgtctcaggttgcaatgttaattcaggaagagagagatttttaaccaaggtggtgtccgcaaaatacattttaatgaactatcagctgtwgggcctcactgtgaatttgttcattcattcatacattctagtcagtcaacagatgcttgttggaaacctactgtgtgccagacatttgccaggacctggggttacagacaccaatagaaccattaacatcgctgcctttgaggartatacagattaagccatcaaataatgacatcttcatgacattgtcaggaaagaaatttgcatgcatataatgcaggaaacagacatgcatatcaccccttctcttctaaaggaccagggaaagcttccctggagaagtacccatcccataaccacgtctcaagcaatctcactggcactaagtaatcctaccatcagttccccctccttttatgtaaaactaagaaggagatgggcagcaggctggagtgccctctgcccagtggtttcctgagagttgaaagaagaggaggaattaactgggtgaaaaaaagggggcggtgaacattgcaagcagcaggggctgcatgcacaaaggcactgaggcaggagaaaacatggctyctgtggtaaatgaaaagaggcttatgtggacagagtgtggcaaggggataagccaatagaatgaggccagagaggcaggtgggggccagaccgtgtgggacctttagagccaggttaaggagtccaagcttatcctataagcaatgggmagcctttgaaaagttttctattagaaaatgccatgatgagattggttcagtttataatcagttgcttggcagtgggaaaaagaaagttaaaaaaaaaaaaaaagtagaggactgtaccagcctgctggaggaggggaaacatgatagctagtattttttgctagtagatatgtacattatagctcaggtaattactttccaccaggctaaatgcctcctgttgctttgttgctattattttctcttggtgttgagcttttctgcagcataccttattcttaggcttcgtggccctgggtttcctggagagaccctgtaagctggatctggaactggacctacaaacctccttctgctagtcggcaggaattttccagggctcaggccctcaggccagtgcagcaaagcggttgaaagtgtgcacttgaggaggcagcagagcctgagttcaatttccagctgttctgtttactggccacgtgcccttgggcatgttgctcaacctgtctctgcctcagttttctcatctgtaaaatgggaaccatcagttacctgcctcagcctttactgtaaggatgaagctgtgaaatgtgtagcaccttgcctgacccagagaaagggctcgagaaacgatgatagtgatggtgacccaagctgcccgggtgacagttccacaagtggagagatgacatctgttttgctcaccactgtgtcttattcctggtacagtgcctggcacatagtgagagctcagtaagtacttactgaagtaaggcatgaaggagcaaatgagtgctcagtgtttgtcccatataacaccactgtggctgcagtggctgtggtcctttatttctaagtgccaggagagtcactgatattttaccgcattttttttttgcattccccatttattaaaaacatctctgggcttattcctagattgaggaccagtggaggggttttgtctttacttaatgtcttttcacctagagacgttttcagatttcaccaccatgaaaacagaaaacattccaaagagctggagagtttatttcaaaaggacagtgagcygtggtaggtactcatgaatcctaaggttggctcagctgcttctccacataaagtggaggtgcctgcacagatatcaaggatctgtgtctgggagcctggcaggccagagggacattcacatatcacacctgtctggctatatgctggcttccatgcagcctgggggaaggtctggatcccatgaagtcacttgatgtcatggagcagatacctagtctgttcccattttccatgagagrggacagggaggtaagttctgcaggtgtccacattccttcccggctccatgaccacgcctgcgggctccagtggtgatgcatatggactctgaggtcaaatgacctgggtgcaaatccctgtttctgttacctgtgggctgtctaacctaggccaagtcacttaacctctctgttcatcttcctctgtaaaatgggtgataatgataatatgtacatcatgatgatgttgggaaggcaaactgagccgatatgtaacaagtgcctcagcaagcaactcttatattctatacttattattgttatgatcatcatgattattagacacgttgcccaagttttgagaagtttgctccattgtaaaatggagctactgctgcctattttaggggggttgwgaggattaggtggatagcgtatataaaataggtaggatacaccaaacatggttattattgtagctgttgttttatttctcagtttgaaattttggggttcaactgkcatatttttattgtggcataaaaataaaaacataaataataacattaaaatatgttggctggatgtggtggcacacacctgtaatcccagcaatttgggaggccaaagagggcggtaacttgaggtcaggaattcgagaccagcctggccaacatgatgaaagcctgtctctactaaaaatacaaaaaattagccagatgtggtggtgcatgtctgtaatcccagctacttgagaggctgaggcaagagaatcgcttcaacccaggaggtggaggttgcagtgagcggagatcgcaccagtgcactctaccctgggcaacagagtgaggcttcatctcaaaaaacaagttatatttaatatgccaaaaataatatacaactgaaattagtggcgcttaatacattcacaatggtatatgagcataatcactatctagttacaagcattttagttaccccagaaggaaaacctgtacccattaagcagtcactcctcattcccctctgacccycaacccctggcaacccccggtctgctttctgtttctgtggatttgccaactctgaatatttcatataaatggaatcatacawcatgtgggtatttcacgtctggcttctttcacttagcattatgttttcaaggttcatctgcattgtagcttgtatcagtacttcatctctttctatggctgactaatatcccattgtctggatagacctcatttggctttatccattcagcaggtgatggacatttgggctgttactactttgggctattgtgagtagtgctgccatgaatagcatggccaagttttgttcgaacacctgttttccattcttttcagtattacaatgactcttaacatatgtggttcagctactttagagaaaaagggaagaagtaataagataaagtagaaaaacagaggaatttcagcttctgtagatgtatatctttcttttgtgttttatttatttatttttttggccaccctctggagggccagccagggaacarccacagagaggttggtcttggtttggtctctaactcttgggttcgtcaacatcccaaggaccacagcttccctgagaaaacctttgatgactgcacattgcagcctggggaagcctgccacccttctccctcactcagagccaaataaaaaacaagggctaccagataatcaagcgattactatgtggcaggcactggattgagtcttccacacccatgatctcatcaaatctttgctcaacttagacaaggaaattgaggctcagaaggataaagraacctgcaaggtggtaccgcaaggattaaggagtagagatgatctttaaacctatttcaccttttgccgaatgatgattctgcagaacagcagcacgtcaagctgtcactcagttaggctcgtctcagctggacctgctgatgtatctgccttagcatgaaaggaattctgtccgagtttgtgaattccattccaggaacctggcacagactcggagattgcattcaacctttgtccctgtgtgcattgagcaactataatatgccagacatggcgctagccaagccttgctcaactgaggttcctcatttgagccacaaaacacaggaagtgggcagagtgcctgtgttcttgattctagcaaggatggtatgtgactagtatgctcttaatgcatagagggaagctaatccaggatgtacgtggatgcctcggaacaccaaagctccattctcagagggattttgtcttcatcttcactgtttctccagcatctgaaacagcacgtgactcatagtagctgtaacataaatgtttgctgaatgagtacgtggaggtagtgtggcgtgcacaaatctgccttcatctactacacgtcctgtttgacaatttataatacgatcctgtttttacaatgcagccatttaaatactcagagacctggcactgaaaataattcatcagcgagcaatgaacttgtgtcagcatcttcccggcagagtttatgtgatcagatcccagatgacatttgttactaatttggttttttttktttgtttgtttgtttgttagtaaagcactgtatcagtcaccataggagcgcagaaggagcaggactaaggtattgcccctgagtaaatacctctctgggaaaagaaagaaatatctgtaaatgaacagcttttacccaagaagcaggaggtatgagctcatgtagagtcaaataaaacccgggcttaaatgtcctcaatgaaatgggcccatacaactcaaagtgatacccagctgttgaaaaagcagaattcatgtctcaagtcagaaatgaacacagtcggccaggtgcggtggctcacgcctgttatcccagcactttgggaggctgaggcaggcggatcacctgaggtcaggagtttgagaccagcctggccaacatggcaaaaccccatctctattaaaaagtacaaaaattagccagatgtggtggtggatgcttgtaatcccagctactcaggaggctgaggcaggataatcgcttgaacctgggaagcagaggttgcagtgagccgagatcacgccactgcactccagcctgggcaacaagagcgagactccgtctcaaaaaaaaaaaaaaaaaaaaaagaaatgaacgcagtctttggcacataggaagatgctcagcaaatgcttatggcagggcctgaattgttgaagaactgggaaattgtatttaccaggaaagctaatagagcttgcaggatcttagagttatgaaagagcacaaaacattcagaaaacttcaagtaattccaaagattgagtaggcaggatgcaggaagagaaaggaaagaaaaggacaaaggaaaaggaaagagaaatggaagagggagagaaaaaaaagggagagaggagggaaggaaggagggaataaaaagaaatttaattcacagctgcaagagtaacatagttaatacttactaagtatttactgtacaccaagtacccatgctaacaggttaacctgatatcattccttctaaccccaaaacaactccacaaggcatgtcatattgcgattcctgttattataaaggcaacagtgctgttcagaaaaattgtcatctgcccaagattgggcagttagtgagggcagagctcagccagttctgctattgagtaagatgccagcctccttcctctcctaaaggagaactggaagttaaattggccgttttttaaatgatttttgaacacttgtttttaggctactaaaccatttttgcacaattgaaattttacccaatataggggtggaagtgagtcctcagtaaggaaacctctactgaggtgtcttgaggccccagctgcccagccccaacctggggttcccccagatgcagcttaaaaaccgatgatctatgtgataacgtctcatttaaatcatttctgaagttttctttgcctaggaactgtcaagttacttcaaggcctgtgtcctctgtttaaaaagaaaaaatccgtttaaaaatccttttgaaatttctcatcagccctctgagataaacaagtaaccttggaaatctgtgggtaaagagtctactggacgcagcatgtcctgatcctccagaatcgatctctgtgttgcagaaaccacagtgtttgtttttccatggtgtgtatgacttcttgcctgtgttgcagtgcattttgaccttgttccaatacagacaggcaggtgaatgtggcaagctgcccaaggagaatgagatgcttggtgacactatcaactgtccttcaagctcaatctcaccttggggctgaaatccaaactgacccagtcccaaagttctgggagttagagatccttgctgtatcctactcctggcacagtgcagactctagtcctggagaattcatgataataaaaataataacaataataagatctgacattctagcattctgtgggctaggttacctaagctgtactagatctctcttgttttcactggctcaacactcattacccgacttctgataccagtttctgtatcagctagaattttgtagttgcaagcaacagattattccctcttatttcattacatcttcaactctataaggtaaatagtgttattatcctcaattttaaaaatgacaaaattgagcatcgactagctaaaaatgacctgcccaaggccacacagccaataagtagtagaactaggactcaaacctacatttctctgatgtcagatctgcattattttaaccactgcaaattctgatacattagtgtaggtgcgttaggaagacctatgtggtgaaatggaaatggacaaattagtattataggtcatggtgattatttgaataaacccagggcaggatgaatggtgaaaaaggcatctgttctcagccataagcacaaagagaaaggtcagcgtgtcagtacagttcagtgccattcaatggttatttatactccagcctttcccagtggaactgacattgagccagcttttgcaaaggcaagcaggagttctctaggcaaaggtgtaggaaggatgtttctggcattagggatggtatggacaaaagccctcattctgtcctgcaacacagttgtgctgagcagtttccgtgggctacagtgaaatgggcctggggacccaaagagaaataggcataaggctgatggaacctgtcatgttcctggcctctgtgctggacagttggggaacatagatgacccagataaagttcttgtcctcaggtagcttacagtcaagcaacttgaacatacataacttaaatttttgctaggaaccacaagtgtgtaagaattgaaatgtcacagcttggtaggaaactagcaaggggtggacatgcctttcyctctgcatttctagcgaagaatatagaaacttctttccaaggaactccagttactgcgcacctgctatgcaccaggcactgcatgtaccatacccacaacacacaagtaactcatagaccattgttaaatgctcccatttggcagattagaaaaccaaggctcagtgagcctgaggaacttgctaaaaatcaaacggcaagaaagtggcaaggakcagagagaaactactgtaaacacctctctgaaaacagctttccttgtagccgtgtcttggctttcctacttaaattgcatttacttttaagattcaatctttcgatgccctctgaagtggacctcccctggttccctgaagaccaaatcaaataactggctgtaatcaatcattgtatgggaatgcagaatttggttaactaaatgttgtgcacatttgagatgcctcatggcatgtgaggacaagcagacttaagagaatcaaaatacagttaaatagacttcatatacatatgtgcacacacacgatccccaccctccccgcccgccccccaacccaccaagcagaatgtcagtttagttcattcatgattccggtggcgtcctgggttcctgcgtggcccctgggtgctgattgttgtcagttacctttccattacagccgtctgaaggaagggctggtgtgttaagagttctcattgatagaacatcagataaactgcctcttagaaaggcatatgtatgtttaaaatgaaaaatgtgtttcttacaaatgtcctgtgaaagcactgaggctttgtgaaatggtttgccggtccattcaaatacaatgagtgtgttttaatgccacatcatttttgtcagtacaaaaaggtaaatccaattaaaactgattgggttgtaacaaccaggtagttctccagtttactgcctgcctttgtagaaggaggtactgtccccctggtgtccccagcatactttttgtagcctcccctgaatgctcgtgcttcaattcatctgctgtctcacttcatatcacagggacctacctatatgtctgcatcccccagtgttctgtgcgttccttgaggacaggtgccacaaccatcttacccactcctgtcccaggcgtttgtcacagggcctgacctattgaagaagtggaagtcatatttttcccaggagaccaaacagtgcttgcacagtcttagagttatgaaagaacacagaacatttagaaaacttcaagtaattccaaagattgagtaggcagtgcygggtcacaaacaaccttgcatgccttgccaaggggtaaggacattgtccttcagatgatggagagccgctgaaggtactgagtcaaagggtgacatggtcagactcatgttttaggaagatcctgcagctgcttcctggaggacgaggtaaagaggagcctggaggccgggccagcattttatccagttcacttttcctcagttgctcatggtggctggaattatgcctgtggagtccaggaaaacatactctttagcatttttcataccttttcctccgtatcttagcaaaataagtctctgtaaatttggactactttttaaactttaaaaaaaaaagtcaccttttattttagattcagtgggtacgtgtgcaggtttgctccaggggtatattgtgtgatgctgaggttttgggtatgaaggcccccattacctaggtaagtgagcattgtacccactaggttatttttcagcctttgccctcctcctcttccctctctagtagtccccagtgtttgttcccattttcatgtccgtgagaacccaatttttagctcccacttataagtgagaacatgtggtatttagctttctgttcctctgttaattcacttaggacagtggcctccatctgcatccatattgcagcaaaggacatgattttgttcttttgatggctgcacagtgttccatggtgtgtatgtaccgcatcttccttatccagttcrccattaacgggcacctatatcgatcccatgtctttactattgttaatagtgcttcagtgaacatacaagtgcatgtgctttgactgcatttgaatcagggatttgccttttttccagttcttttgctcttgtctcttcttcagcaagtcccgaacttggcctttattcactgttggtctgcaaccctggacttccctgatttttccagtgggtgagaagatgtcaataaggtccttgcataaaccgtctggagtgtggaggagagagcactggcagtgtctcctcctcccccagataagccgtggggaaagatggtttagaatccattcacgagatggaaggatgggttagaatccatgcacgagatggaaggatgagttagaatccatgcatgagatggaaggatgaattagaatccattcacgagatggaaggatgagttagaatccatgcatgagatggaaggatgggttagaatccattcacgagatggaaagatgggttagaatccgttcacgagatggaaggatgggttagaatccattcacgagatggaaggatgggttagaatccattcacgagatggaaggatgggttagaatccgttcacgagatggaaggatgggttagaatcccttcacgagatggaaggatgggttagaatccgttcacgagatggaaggatgggttagaacccattcacgagatggaaggatgggttagaacccattcacgagatggaaggatgggttagaatccattcacgagatggaaggatgggttagaatccattcatgaggcagggggaggaggaaacttactggacttcagattttacaggagcacaggaaaaagacatacaccctgaacagaggttctacctgtatcaattcctgttgtgcgactcgcactcaacaacagtccccttgaagggaagtagtaggcttcagaaggcagctgcagtttcctgtttatttcctgcctctgtctacagaaatggatcacattcctgaagcttattcaccacggggaaagcgggattgaaaacagctcaggctctggccctggggcactgaggtctgcatctcccctccaccactcataagacctggcacaagctgtgaaggctcttccagtcctagtttattcatccgcaaatgagtacctcctggatgtgtaytgtaaaattaaggaggacgagcacttaacacttggtgagcaacaaagggaaatctttctgcaattgttattatgaagcattttctcatgagtaccctgactctgggattccttcccccaaatcaccccccagttcattgggcaaagacgtagggaggagcattcctggcagagggtatggaatgggcagagatgtggatacagaagtggatgatgggccaggcacagggcctcatgtctgtggtcccagcactttggaggctgaggcaggcagatcacctgaggtcaggaccagcctggccaacatgacgaaaccccatctctactaaaaataccaaaaaaaaaaaaaaatagctggacattgtggtgcacgcctataattccagctactcaagaggctgaagcaggagaatctctcgaacccaggaggtggaggttactgtaagcggagatcgtgccactgcactccagcatgggtgacagagcgagactctacctcaaaaaaaaaaaaaagtgaatgatggactgagcccttcccatggggcaggtactgtctgtgctgagcatagaagccacagagatgaaccctgcataccgggcctctacttgggcttgcattaagcagtgaatacttacttagcaccttctatgtgtcaggtcctggaggaacagatgggaattggactcaatgcctgctcatcccaggactacagccatggtcctgaaaagcactgtcygaggtgctgccccatagtccagatgctggttctgttggcagacagatgakcaccagctgcagcagctgctccaggcatgggagaggatggttctgccctgacccsgttgcttgacagaaggtcctttccatctccatgtgagcctcctttgttttccagggtccgctggtggttggtcctttggggaacccagaaggcccctgcttaaccccaccagcctgctggaggagccaagagcctgccagctctgcaagacatcccaactccatcacctttgcaatttccttcttcctccccatgctcctggcagccacaggcttggtttctgtgcaatgatgtgagtcttgggcaattcttagagaagtctcattccgtgtagtttgctttctgaaattaaagactgaaaaataatcctagagtgaacaattccatatctgcaaatttgatcctacagaaacctatcatgcccacatgtgaaaagatagttattcaagggtgttcaatggagcagtagttgtaagggggagaaaatggaaatgacctaagtgtccatcactagggcattggctatgcccattctttttgtttgtttgttttttgaggcagagtttcactcttgtcacccaggctggagtgcaatggcacagtctcggctcactgcaacctccgcctcccaggttcaagcaattctcatgcctcagcctccgagtagctgggattacaggcgcccactaccatgcctggctaatttttttttttttgtatttttagtagagaccaggtttcaccatgttggccaggatggtctcaatctcttgacctcatgatccgcctgccttggcctcccraagtgctgagattacaggcatgagccaccatgcccagctggctacgcccattctataggatcctgtgcaaccgttaaaaggatgaagtctgcctgtacgtgctgatgagtgagagaagcagcataggtcattacacaaaaatccatgtatatacatgttcccgtttatataataacaaatggatataaatataatagcatctacctcttagggttgtcatgaggattaagtgggttaatagatgcaaataccacataggaggcattcaagtgttagatgatgatgatgttgctattgctggtatttcagtctttatcttgctgtgatctaagctttcataatgattttaaaggcataggaaarggttacaataggccctgccattatcttgttttctatacattgggttgatcacaggagggtgagatttttgcctctgtggagtgtgcacttctcctgtggttacacagccctcaatggagccatgtgcctggggtcaccagctcatcttcatttgctcaggaccatccagttttaaaactaaaagtcctgtgttgtgggaactccctcagtcctgggcaaaccaggacagttgacctcttccatatgtgcctctggtagcccagttgatttaagaagtatacagacacgtggtcgttaatgtttttaatgtgtaacagggaaaaaaataacatacaggtggtacatgagagagtattattcagccttaaaaaggaaagaaattctaaggtatgatacaatatggatgagcctggaggacatggtgctagttaaataagtcagccagcaaaacacaaatcctgtacaattccacttatgtcaggtacctagaatagttaaaatagcagagaggaagtagaatgggggttgccaggggctatagaagagagaaatagagaattattatttaacaggtagagagtgtcagttttgcaagatgaaaagagttctggagatggatattggtgatggttgcacaacaatgtgaatccatccagtaccactgaactgtacactgaaaaatggttaagatggtctacagacatatcaccctgaacacacccaacctcgtctgatctcagaaaaatggttaagatggcaagactctgtctccaaaaaaaaaaaaaatatttgtgacatcaaatatcacaaacattggtgcataagataaagctaaagtagaatttaaattaaatagacatatgaaataacttaaagattatgggtacactagaagcagaagttggggaaacactgttgtagtctattctcagcttaggttgaaagcacctcaaccctcaacttcctcaacttgcctgacttcacagtccctcatgcaccagcatagtctttcttttttttttttttttttttttttttttttttttttttgagacagagtttcgctcttgttttccaggtgggagtacagtggcgcgatctctcctcactgcaacctccacctcctgggttcaagcgattctcctgcctcagcctgggatcacaggcgcatgccaccacacctggctaatttttgtatttttagtagagacggggtttcaccatgttggtcaggctggtctctaactcctgacctcaaatgatccacccgccttggcctcccacagtgctgggattacaggcatgcctggcctccccatagtctttcatgtgtgtttctgccccacaatgggtcgttcattgcagtccaggaggacttactccagtgtcccctgggctctgtgcacacctggcagcatcagaggtttgaaatcctgaatcctgacattcacaaaatcctgcgtataactttggctttagtcctgtcacctcaccgttgggctgtgagcacctctggcagggtccttgacagtatcctgcagtcgggaaggggttctggggcatgagtgccaggtgggcaccgggagcccagagaggtgcagttggctttgtgttgggctccttcctagtggaagctgagcaggcttcatctcttgtcacatgccaccagcaaacaggcattgtgtgcctctgtgtgcccagggcaccttttccatacagcctgggctcctgggtgctatgggaacctgagaactctgccctctcttccttcatatcttcatgtccagagctgttatatagataagacacacacacaatggtgccatggccctctgggagccagtccctaagtctgacaccagctgggaagggaccttggacaaatccccaggaaggggccttggacatctcttaaactatgctctgcagaacattccatgggtcttatgcacagaaagccttccaagttcaaatcaggttgggtctttacactgttttccacagttcaaggtgtcttaagcttctgatgttcaagatggtaataataatgctattatataatagctgacatttatcaggggattactatatgccaagtactgtggcacagatattaggtgcattgtttttatttaatactctcaagacctaaggcttattgaaatgaaagtaattcattcatagtccgggttctccagaagaaaccatgaggagcagataaagatggaaagcagagaattaactactcatagtcatacatgacttacagcaatgcttctgaaattttaaagagcacatgcatcatctggaatcttgtttgaaaacacatttttgctcaatagatattgggtgagctctgttgctcaataggtattgggtggggcctgaagtatggcatttctaatagcagtgggctgcagaccaggctatgaagaggaagacattattgcgcctgtattttttttcttctgcacttgaaatggaatacattcattcattcattcactcgttcattcactatcatttgtagaggcagtctcgtagtagagaacacaagctgtgacatttgtccccaggttccagttctggttctgcactttactaaatggatgatttatctaagtctcggttgcccgtccgtaaaatgagagtgaagtgaaattccttttttttttttttttgagacagagtctcactctttcacccaggctggagtggagtggagcgatctgtgttcactgcaacctccacttcccaagttcaagcaattctccagcctcagcctcctgagtagctgggactacaggtgtacatgcccacacctggctaatttgtttgtatttttagtagagacagggtttcatcatgttggccgggctggtctcaaactcctgacctcaagtgacccacctgcctcggcctccccaagtgctggaattacaggcatgagctaccacacccagccaaaatttacattttttagcatcattgtgactatcaaatgcaataaaatgtggcaaaagtctttccccatggcctagggcatggtgcacatttagtaaatggctgggacttgggagattattgkattactcatttttttattcatttcgaaaaagattctcatatggctcccagtaagtttattttaacatttatttcttacttatttcagcagagacttcccagtgactcccatggtggtagcaacaggccccagttatcctcaggaagcagaggaactggcatagaccaagagacatgatttctaatcatttcagcaaaaagtaggaggaaattgataacgagatagatacaagagatgaactatgggaaccatttggcaaatgacttcaccagaaaaagagagtgagaagcgtgtgtgagtggaagagagagagagagagagagagagcgcgcgagaaactggaacggggtaaaatgtcaacagatcgcaagctgttaattatctggagagaactaaatattatgtaggcaattatcgacaggcgtctgaaagcaacaataggagaatttggtcctcagccaaattccatctccctttggagaaggactggggggatgggctttagcattcagagcaagcatttcacacagagggagagcgaggggcccgagaccctagcaaggggggtaggcaggggtccccccgccccacccttccagacaatccatcaggatcctttgccaagcacacagcgcttggctttgaaaggcggctttgcccaaaagctctgggcctggaaacctcagccccctcctcatccaccctccctcccccaagatgtcatcttttgagacgatttcatgtggaagcatcgctaagtaaattcgctaaatgcctattcatccccgtcagatggggactcggtgaagcggtaaatgtgaaaatggccccagctcacagccctgaaaggcgctttctgggattgccaaatggaactgcagccgctgaccctgggagacctgaggcttcacgagaagggggcccaggagccccggcccggccccttcaatcctcccactaagggtgtctgagagaccttatttattattccaactgccggggacccattcagaggttaacttgtctcgtattcatcaggacaacaataatgaactgttgcggagagtggtgagggggttggtaaataagagctgttaaaacgcagttggaatgggcctctttatggtttggagagaaacattgcttaaatttttttataggccgatttagtttccacctctcccagcgacttattaaagaggctctgtccccrcaaactacaggtaacagtgtcggaggcaccagtggactttaccttggcatgcacgatggggtttmaccacgcgggagatgcaccattgtagggacacgtggggttagccctttgcgagcatcccctgggttcacctctgtgcccatcagcaaggtttagctttccgtgtgtgtgctgtattcaactccctgcagacacacggggtgtttctggtgcctgccgctgctagaatggctggttttgaattggtgtttatttcagtaataggatgggacacgagcagcgctcattttcactgctgcctctcttaactgctttgtgccccctccgctggaattatgagtwggtcaacatgagtcatccaatgagagaacaggggcttggagtggcgagactgcagaggcgcagggaaatgaaggagggggtgagcagtaggggcagctcagaccaaagagttgggaggcagagcaggacgacgtgcattgattgtgcccctactgtgtgccctttaaatccacccagttgtccattcagtatatatgcatgatgggcctactaggtgctgggcatgtttaattttcaacctaggygcattcagagaaagctgccattcagtgaggttaaatgacatccttggacacacagctgactcagtcatggagctgggatctgtccccagatctttctgtttctgcccaagcattgctttctaaagcactgtcctgcttctcgaaggtctagcttctattataaccccagagatgtttttttatctttctgctctcttctctgttcctcccatttgaaacaatagttaacgctttcctttgaagtaaaaattccgaagcagagaaggctggtgataaaggagctgtcacatcagcaccatttacctgtttgggtttattcagcagaagaggcgactgcgtttctggcagatggagacccgtgtgactgccttttaaaatactgtcacagctgtatgcgcaagcggattagctgtgattacactgctagtgctgagattgatggggataaatttgggataacaatgctggcaacgatgtcactcgtttgtattggacttcatattttttaaasctctctcaatcagtagccccgtggttatcgaggacttggtatccgtccattcattgatgcattcattgctcaaagtgcatttgaaggagtcagtttgaacacacatcactttgattcatttgtttattcaacaaatattaatatagctcctactgtatgccagtgttgaacaaatccagctgggctctgtcctcgtggaacttacattctaatgtaagcaaggtcagtgctttcagctggtgatacaagagtgaagtattataaacagagtgatgtaataaaggtggggagagagcgggaggcaggtactactttaggttaagtggtcagaaaaggtctctctaaagaggtggtatttgaaaggacacctgatgacaaagccaagccagcaatactgggagaaayttcccaggcaagcaaatgcaaaggtcctgaggttgctgtgcatttagctttgggctgacttgctgtttgccaagcccagtgccaggcactggagattcccaaacatgtggagcaccacacttgccctcacagagtctccagtatattggagtatagaggagagaaatgcacaaacagcccattttaacatagtgtgatagagtcagtgatggtgacataaaaatggcgatataaagaggatgccttatcagcctgtgtgcaaatgatcagagaaggtgcttcaarcagactgacataattggtgaaacttgctttctgtgacaaagacagtacccacggtgtctggcctgactctccccttggtttgtttccacaggacaaatgaccagttggtggcgtttctctcccgataccgagatatgaatttcttgaagtcacacggccgggacaatgcaaggtagcacctcaacccctacccctgtacaaaatggaaatgaaaatctgagtgatcatttggggaattttctaggctggtttcatgcagccacagaaaggttgagggtgggagaaaggcttggcaccagctgtccttcgctgtgtctgcgtgggatctgaagtagtcccttctgtcagccaaggacaagataaccatagatgtttctcatggtgtgacagcccttttgattacttcccccaaggacttccacaagtccaatatctcattgcagcaaccctttcagtagggcacccacggttaattctcattttattgatgggaagactgaggcccataatgtaagcaacgtccccagatcgttcattcagtcagccactcattcaaatacttaacaagcatgggcgtgtgccagttgctgttctagccgcaaacaagaccaagtccttcctctcagggaattgacctgtagtggaaaagagtgtcataccagcatggacttgaacccaggggtcctgatcccagccccatgtcctcctcactccctcactggtgtccaacacatcagcaggggtgggaggcacccagaaccccaacccagatccctcacacctctctcgcttaaaatsaacaatgtcaaaaaaatagcatctctrcagttcagcaytgagctgagcccaagtctccatgatggtccatcaactggaagggatacagtattgagcgccccctgtaggtgacatcacgtgatgggattcctcattccaatagaaaataccattaaaggccaggctcatgcctgtaatcccagcactttgggaggccgaggcgggcagatcatgaggtcaggagtttgagaccagcctgaycarcatggtaaaaccctgtmtctactaaaaatacaaaaattagccaggtgtggtggcacatgcctgtaattccagctactcaggaggctgagacaggagaatcacttgaacctgggaggcggaggttgcaatgaaccaagattgcaccactgcactccaccctgggcaagagagtgagactccatctaaaaaagaaaacaaaaaaagaaaacaccattaaacaccagtccagggtggctctgacatcccggggtcttgttctagcattgaacctggcagtgcttgggatcatttcagcttgttaacgtgcatggtttagctctcagagtgttttgttttgtcttgttttcattcaggtgcttcatttgaaaattaatagccccatttaaaaacagcagtatttcctatgaaaatccagatttctagccagtcttaaaaaatctgaaggtccattaagtctgtgcctgaattttctcatggcagttatttcctggatcttaggtcgctcggtccttgcctgtccccgttccccaacctggmccccgaccacatctctgtttgtaatctctgctttaaatcttcactgctgttgttggtgggagtgtcattttggctggctctgtgacagtttacccagttatccacagcatgggaggaacaaaagcaagcaggtagctccgtctcctgagctttaaagaagtaatctggccaggtgcggtgactcaaggcctgtaatcccagaactttgggagggtgaggcgggcggatcacctgaggtctggagttcgaggccagcctggccaacatggtaaaaccccatttctactaaaaatacaaaaattagccgggtgtggtggtgcacacctataatcccagctacttgggaggctgaggcaggagaatcgcttgatcctgggagtcggaggttgcagtgagtggagattgtaccactgcactccagcctgggtgacagagggagactccatctcaaaatagaaaaaaaaaaaagtaaccctagaatccttgtgttgtatcatttttctaaattgaaactttgatttcattctgctatttatggattgttcctgcccctactcacagcctaccttctttacattaaaaaggaggcctctttctgcaacacccgaacttgaagatgctctgtaaattagcacagattagtttactacgctcaggccactaagagtacagaggcctggctggatgagtaagaagaatcatggccactgtgtattgtgttcctactaagtgggccctttttgtataggatccatatttgttttcacagccactcaatgcagctrtaagaattattctccccatttgtcaagcttctggagtttacctgatttttctgaagatcacacagctggttaaatgctagaatttgaacccaagtttttctggccccatagctgcaggagcaaagtggggctgggcaaggattccatggaggtggttaattgtcagaagtggctcagacattggtattcctcgccctcaggtagagaaggaaaaacccttcttcttctccaggtagcagctaataggtgatttgtgcaaagttgtgtctcgagaaaggagcccattgtaaatgtatcaacttgtgtgtgaattacatccaccctagtattaactatttcagcctagtcaggatttattctctgagcactatttgtcaggcactgtgctaggaactgagtatagcacaagttaaaaacagggactgtgaggttacaccttctggtttggaattctgatctactgtgttctagctgtgttgcattggacgagtgacttaacctctctgaactggtttcataatatttgaaaatattaatagacctatactcatttattcattgagaagattaaatgagatgctgcatatacagcatttggcatagtaaatgtttatgatgatggtgatggtgatgattatgtcattgttatgataagcatagaactaaattgttgctggtaggagaaagaaatagatggagaatgggcctgaattttgcctctaggtgcctgagtacattttgtataattgatgtgcatccgtaattgacaggtggtacccagatgtcttgggacaacataaagaagtctcaggctgaggaaatgcttcttacacctccctccaagaccctaaaacccaaaggcctcttgacagaatagctcacaacttccaactcttgcgtgtgagtccccagctgggattttctcatttaccggaagttagggcagtgattcagcattaatttaatagtaaaacaagccaatgtcccattcactggccacttccctctttgttagctgtggcctcacctgctgcacgaataagcctacctatagcccatcatccatggtccctcccaagtgaccagagctgggcgtggcttgctcaagttctttcactggtgatgtgttagggagaactcttttggtgggaaatgacagaaacccagctcaaactagcttaagggtaaagaacattaccagatcaggtaactaaaacattagggctgacttcaggtatggctaaatcaagctgtgcaaattatatcatcargcccagactctctattagttctgtttttctgtgtgtatgtttaattttctggcactgggtggggattattggcaatatattagcctccttttatagataagggaactgagactcaaaaagatgaagttacttgctcaaactcacagcactagggcagcggggaggactcacacccaagtgagtgttcacagagtccaagctcataattctcacgtgatgaagcctctctgtgttctaggcctgctttcttccaatgcactggtgactttgaggcagctactctgcttctcttgacttcattttctccctttgaaaaacaagggggttgcatgagaaagtctccaaattcycttcccattctggtatttcatgtgtccagaccagccctggtaaaagaggaggtgacagaggcagagatcttgaaagacagagagatggggatgaacaaaggcaagcagtgaaatacagaataggccacggggtgcctcggtttttaattccacgtagctcctaatagcaatgttgaccttctgtcttcatctccaacctttagcagccaatttggacttctggctcccactgtgaagagatggcataaaggcaaactagtattctaatagctgccaaattggtcctgattgtttctgttattaaatgaaggggagggttgtgttcactgtttctccttgctttcctccaaaagtaaagtcactagatacattgcaagacaggtagcacaattgtcattttcccaggcagcctcagcaggkcttgcagaagcaggtggccgcatgtttactctcagcctgaataatcaggtatttggaaacatccctacaagtccctggccttggctcagggagcatcagagaagtttttcaaatctctgaaacctgttcaagtctcagtgtgtggggacaggcctcttccagggagctggaaagtgaaaatcggagtttttctgagacttttccttccctggttgatctaatttctccacttcatccagggtcaccagggcccccatgttagccctgggacacagtgtgtgaagtgccagagcatagatgctggagtccagccacctgggtcgaaatgccagctcttctataccacagccatgggatgtcagcaaatggcttcgacaggccatgcctctgtttctccatctttataaaattcaaataatgatcatggkattggggagatggagcatcctcactggccacaggaaggccccacgctgggcgcattccaggacattttctcatttcaccttcatttagcaggtgttaccccatttcagaaatgaatacagctgaggtttgagagtcgctttaccttastcaaggccctacagctagtgaacgacagagctgagatggaacctggttccgtctgactttaaggcctgtgttcttttattactccatagtgactgcatttgagaggacctgcaggtttacgctctcgaggtgtgcagatgaaagaaaatcctgctgaatgtaaatagaattatctttttgcatgggtgagggtaggtccttcccctacttcctagggtcagcattttgcaaagtgtgtttatgtgccaccaggacatgggggattcttttgggtcctttataagtgggcatgctatgaaagttaggtattgatcttatgtgtatcaacaaatttataaaattagctgctccaaccatgacttatggatattatgcttcgaataaggctacattgaaagaaaacagttgaagctatttaaagttagcttagaggccgggcacagtggctcacacctgtaatcccagcatcctgggaggctgatgtaggaggatcgcttaaggccaggagtttgaggcttgcaccactgcattgcagcctgggtgacaaagcgagatcatgtctctaaaaataataaagttggcttagagcagaatattaaggggcctcttgtataggatgctacataaagcacatagcatagcagttaagaatccaggctctggagccagactgtcaagattcacgggccaactctaatayccactcacagtgtgtgaccttgggtaagttacgtgagttacctgtgtatcagttttctcatctgtaagatgggaatgaggataatcataccaatcccatagagttgttgcaagaattaatatatggaaaagcccttggggacagttagttgcgcctattaagttgatgatgatcacaatggtggtggtagtagtggtgataatgatggtgttgttgatatgagaagaatcttgatgataatatacacataattaagatgttacaaaaatgttcaataactcttatgttcaataactctcatgtccactggggacatgggagattcttttgggccctttataagtgggcatgtgatgaaagttaggtattgaccttatatgtatcgacaacaatttataaaattagccactccaacccatgatttatgggtattatgcttaaagtaaggcaaagcatagtaagagaaacagctatcatttcaaatataagaaagccaggcaggtagattccagccccaggtcagaagtggtatagagaagtttctctctcttctctggtctgaaccccatctgccagaggcagcattctcctattggaggccgggatggcatctgagctgcctccctagctccccttttctgacattgaactaatcatcagacccaaacctcctttgatgtataaacaagcaaatgtttaaacaaaagttggcaaatcagtcgagagcctggccaggaacctcctccaggcaaatccgcattcgggaaggcctttggtgccagcttgcttattgagagaagagctctgtttctggctaacttgtagctccatgactgatgcaaggagatcattaatatctcatctccaatagggaaagcagattgcatttctcttttgctttccttaaacccaaccgatgcgttcatgactgtttgcatgttcactttatttaatccaattatagcagccacgtcaaaataaagtctggcattatgtaggcacccacacaaaactgcacacacatacctccctgggcctcagcgtgtgtttttaggtcatctttagaacttttcttctttccaaacaatacacaaagaagttagacaaaagactagaggggaagtacattcccagtgtcatctctgaaaggtagagtatgatttttattttcttctttgcatttttttatgttccaaaccatctatcaaggctatgcattccttttataatcagaaaaaaggcagtaaacaatgttttcaaaaatacatgaaatgtggaaaaccaattagccctcaacagacctttagacgcttggcgatgcaagctgattcagtgacgtgagccctgtgaagaatgtgagccaccaagcccaggtactccagcctcaggattcaggccactgactctgcatttctacttgagcttctttttctgccctccttgggaaatataagaaagccaggcaggtagattccagccccaggtcagaagtggtatagagaagtttctctctcttctctggcctgaaccccatctgccagaggcagcattctcctattggaggccgggatggcatctgagctgcctccctagctccccttttctgacattgaactaatcatcatccttgaatgtcaaacctaagtcagctttctccacmcagggcagcaataataactggtacatgtgccactgattatcctaagcaccttacagatattcactctttctacaacaaccccatgacataaatgcgatcatcatcgtgcccattttccagatggggacactgaggctagaaagattaaataacacacagctcataggtggcgagacagacttgaagccaagcagagtgactccaaagttggggttctttttatttttctttttgagacagagtctcgctccatcacccaggctggagtgcaatctcagctcactccaacctccacctgcaaggtacaagcgattctcgtgtctcagtctcccaggtagctgggattacaggcatgtgccaccatgcctagctaatttttgtagtttcagtagagatggggtttcgccatgttgtccaggctggtctcaaactcttgagctcaagtgatccgcctgcctcggcctcccaaagtgctgggattacaggcgtgagccaccacgcccagcctgaagtcagggtgcttaacyaccatgctgcactgactccctaagggtgctgactgcggagtttccctccatatccaagccacgtggacttgtgggtggtatgtcccttccaccaatcagatcaagtcggcccctatgaagtgaggttctgaagctgaggacttccctgtagcttcctttggcagccacagggcccttgcactttcaattttctgtcactcataaaggccttccccataactccttagaggactgattycttctctttgagcttgcatgccacctgctcctcagtgaagccttccccaatgatctccactaattaagtccctgtctctttattttctatcattacccccatatttgttcctatatagcatgtaattttatatttgtgtttcatatttctcgatgtctacttacttattagaaccttgtggctagagtgtggaatgcagagcctgacactaaggcttgattcccctcattgccactcaccagctgtgtgggtcttgggaaatttacttaacctttctgtgtctctgttccttcatttgtaaaatgagccctcatggggttgcagtgaattctaaacagaagaatatatattaagtgcatagaacagagcctagaatgtagtatacgctcaataaatggtagctgttattatttacgctttttgtcttgcctagaagagagagaagggcggggtgatgtccattttatttaaaaccattttctcagtgcatagagcagagcctggaatatcgaaggtgctctctagtgctgctaaaggaatgaattcctcaagcattcttgatcttccagctactgtaggatagaggaataacaattgactccagctcaggcccagaaggggcacagcctaccgtgggcctgagagaaatggctagcaggggccctgaggaactgccaaacttcaaaatcagggagctgaatcctcgcgagctcatccagagcttggacagaattagaaggatggccaggacacttgtcaccttcatgccacaatcatggctattgcacaactaaaacaaggacttctgtccttggtgctgaaatatcattgctctgccagactaaaggatttcttcttagctgtggaggtgtcctatgtacctgtctaccaaatcccagaagagagaataggacagatagaaattcaccctgataaaggaaaaaaacataaagcatcgtaatggacattatggagcccttactatgtgctaagccctccctgtatacaatctcatttgaatcatcacaccagctctgtgaattagctattatgatcaccatttcccctgtgagaaaccaaagtaccatatgattaaagttgcctaaggttagtagaagacacaagacttgggccaagtaatctgattccaggactcaaaatcttgccactgcatcccaatagaataatatttagctgtgactttgtgccagtagagaaaaatctcaggcagctaaactgccctttcctgagagcctaggaagagatgtgtgagcctgttcacatagctgactgatttcatgcattgtgggtctatatgatttattccatgactttattttttaactaaaatccttaggttgtacttatgctgaaggagtaatctagattcaatgacagattaccagacaggaaaacagaaaagggggagattttattttttctaggcattgtgactttggatgtatcatttgtactttcattctcaggttgttttttttttaatttgtagcattagctatattagctgcttgtgaagattccttcttgctcagacatgctgtaaacttgaagagcagagttattccttctaaaacttacagtgggacagcttaattctggaataattccatacttgatgaatataccaagattgtagccagtgaattaactgaattgagaaacttctttgttatccacctttctgacattatttccaaaagccacagatgtttttttaactgacttcttctcccatgggggagaatcaggacttcttcccaccctctgtctgatttactttgatgctcagctgagtagatttggtccctgggatgtcccaataggatcatatttagctgtgactttttccttagtgtgctaataggtaaaaatatcaggaaggtgagctgccccttcctcatagcctaggaagtaaaactgaatgcaaatgatttcatatttgacctcaggtagaagacagatatcttccagaggtctggcagaaagattcttccaaagccaacaataagcccttctcttttgattctctctcatttctgggcattgtctttttcaagcattagaagatcacagatccgttctttctatctttttggtgggactatggtgaatcggggcatcaaagatggcagagtagttaagagcttgcattggatccagctagacctgcatttaaattcaagacttctggctgtgtgaccttgggaaagttacataacttttctgagcttcaattttcttttctgttaaatgtgtgttagaaggatcyaatacctagttaacgaaagtctgtgactgcctgattgcccaacaggtgtggctgttacccttctttttattcattttttcagtaaatatttattaagcaccagttgtatggtaggcactgatgtaagcagtagggatacagcagtgaacaaaaataggcaaaaatctytgccatyttgcagcttacatytagtgagtggaaatagacaacagactaaataaatatcttgtatattgtgttagaaagtgaaaagtcctgtggagaaatacaaagcatgaaaggaggattgaggatgccaggcatgggggagggatgtcatccttaggtaagaagggattgatggttgagtcggttcattgcttgggtgaacagcgcttactaaacactttgcaaggccctgtgagaagcatcatccatcacactttgcagctgattcaggaggctgtcaagacacaggtgtcatggggcttatcttacagatgaggaaactggcattcagagaggttaagccagccccacatctcatagcctgtgaatgcagaggcaggattagtacctagatcacccaatgtctgtttgctgtagtgtcacctgttgccccagttgccccaggtaacctactcaatgggaaatgaaaaggaagagcgtatcattggtcaccttttgtatatggggcttattgctacagatctgtgcttcacgcctcaggtgagagagccatgcgccccttgttggtgagccatattttataaaaagtcactcaggtgttcactgacttaccttgccttccaattttaccttttcaagttatggtaaagaaagggaagaaaaaatgcaaatccctgcccaaacagctgatgcctctcccctggtagataccctgttgctgggcctctgccaccatctcctagtccaagacttaagtccccattcacccctgtgactccagaaacttttctgagacctagggaattggttgtctccatttactcttagttaaccaaagcatgcgtttgcagcatatcagtttttgaatgygataaatacagcaacccatctcccaatcccatgaatatttcattttggagatgactgcrtaaatattgtatttgaatattatggtccgggacatcacattaaaattgcaagacgatgctattatcccatataatggaacatgaaattaaaaactggaaagaaaaattttgctagtcctctcacctgtatttcttctctgtctgtctctcatggttagtctggtaaccatgtamgtttgaatacaaattatctaaaattgaaagtttcaagcatggttaagtgcatcractggacatttttgtataattagcactagccagagtcaaggcagggttttattttcctaaactcaggggcttcctttgatgacccagttagagctcagttacatttcagtgggttaatactgtattacaaaaaatcttcgctgagttccttcccagcaagaacatgactttgctaatgagcttggattatctgtcttccattgtctgtctgacccctatagggatttaacttcacaacccagacctagcccaattttgtattttaccaagggggaaactgagacacagagaggactgctctgtagcaagaacatggctttgctaatgagctcagattttgcatgtggaaagatgtgttagagaaagagcaagacccgtgacataggacagctgggtcttttgattggttctacccttgtgttgagtcctctgtgtgtccttagaaaagttgccagtcttctctgggctcccgtgtatccatatgagatgtattgcttgccccatgcccttttcctgagtataacaatgtgacttatagaatgtcaaagctggagagtaccttgggaattacctaacccaggattattgtgactggaccgatggcttatgggctggattcatcctagagagatgttttattcaaccagaaatgcttttttattttaaaggagtggaagtgcatttcagaatgtgtgttcttcacttctctgctaatttcatcagtccttgttttttcgtattcaggctgcttcacacgcttccattatctgtctgaccgccctgtagggatctaactttacaacccatatctagaccaactttgtattttaccaagaaagaaactgagactcagagaggactccttaacattttgaagtcacccagctggtgacaggtaaaaccacactgccccacagatgaaaagcacatttcagccgaattaagtctgttccctgccagcgttaccgtcatcgccatttcattacaccatcatccattttgtgatgacttaggtgtactatgtcattatcttccatagtagccaatgtctagaggtgggttttctgctcatgcagaaaagaaatgctaagaatgtaggtttactaatgaggtttcaagtaattcccctgagtgaatgtcagtggatttgtgggaagcccggtgagagggaattctttctggaattcagcgtgactaccagggcaggaccatcttcagcttccaaaccctgaagtctcctcatcacagtagacttttcttgagcagctgacctgcactgtcctaggacctggaagggaggcacaaagtccagagccaaagtgtgttgtagtgagaataaaggctacctgcgaggagacaggtaactccagtctgaagacagagtaacgaggtctgttgcagaaatgcagacagctctagaactctgagcagactggctcagtggaagaggaagcatttttgtgccacagccctggctacctgccctgtctggagcctaagaacctccccacacatcatggttgtgattaagttgaaatcattcaggcatgtattaggactttttcaaatgcaagtgaggaatctcatctcaaaaatgccttaagcacataacacacaagtctgggagagggtcaggcacagtgagatccagaatctcaagtgaacccatcaagcgcttggcactgtgtctttctgtctcctatttccagtttgctccattgtcagacaacctctatattcatggtgatgagatggctaccagcagccctaggctgacatcctccctgccagaaatctcatagaaaagcccctccttctcactaactccagcaacaatccaagacctagtctcagacccagcttgcattgctggcccatccctgaattgattatggaggccagacagatgggatgctctgatccatcctgggtcatgttcccaccccctggtgctagggtgaggatacagacccaagtaaactgagatttaaggatgagtccaaagtaaagcaaaatgtggttcccagaaaaatcataaatggatgctgagcaggcaaaaacaaggcatggagcaccgatacctgctgcagcatggatgaacctggaaaacattatgcgaagcaaaagatgcagacacaaaaggccatatattgtatgactgcctttatatgaaatatctagaattggtaaatccatagaggcagaagacagactgatggttatcaggggctagcaygaatggggagtggctgtgtaatgtgtatggggttttcttttgggggctgatgaaatgttttgaagccaggcagaggtgacagttggacaacattgttaatgaactaattccactaaactgtacaccttaaatgcttaattttaaaccactgctgttacagcagagcccctgatccccctccagtstgcatggagcctgcatggagtaggcactcggtgctgcctgtagcaatccacacagcgcctttgtggaaaatagaaaaggcagctcttcctcgagacacttagatccccttcatcataaaatcatttcttggtctcttgttattttacattgtgtggatgttatctttattaaaaatgtatgaccttttcaatctgtgtcatctgcccagagcaatctcccaattaagccaaactggtctgctccccagatctctgatgagtctgttttctgtctagaatgtccatttttctctcctccctgcacccctcctagtctgactcaagccctgcctcatccatgacgccatccctgaccaccaaccaagtccacagcatgctggcttttcacccttgccctagtccccatttttccagaagttcctcgaaactcatttaacctatggttatatgtgcctgtatcatatttgcccagtcagactatgagttcctagaagataaagcctgtcgtttatagtgtttcctgtctttcactgtacccaccacaaggctggggttgtggtaggtgctggacatgtatttgcctattgatggattcagtatctatccattctgtgaatactcgctaagcacttactgtgtgccaggcacagagtgatgagcaaaaacaagaacaaccctagctcacatgaagcttgtagtctactggaaagggtagacagtaatcacagaatcacagaaatgtgctatggcaagttgctgagttcatacacctgtaaatatgggttaataaaagtactgtctctggggttttcatgagaattaaagtagataatccatataaagcccttgtaatgataatgctcatatgttttcattgccatggtgatggtggtagtgataatggggatgaagatggtggtgatannnnnnnnnnnnnnnnnnnnctctgatcgatgaaaagaagttcactcagggaacactgaaggggagaggaagaagacaatcattcccagcacatacggagtccatgaccaaaggcacatgtgtagggaaactgtggtggtgtggagaagcattcatacaatagagttattcataagggcttgaaaaatccagagtcctggtcgtgtgtaagggccagcagcctgaaggagcagaaaggtccctgagttcaactctagactgtaagctcccatctagataactagctccttaggagcagagctcgtccttacttctccttgacctgtaccatgggccagcacagtacctggcacgtaatacgtgaaaatggtgatagtggtgctgataatgaagatggagatgatgatgatggtggcagtgacagtgatgataatgaaaatggtgatgatggtaatggcaatgatggttatgtgtgcaatgaatgctaattgctaatggactgagcgtttggcccaaaagccttggttctagctctgtccaccctcccaacatgcccacgtcaccagctctgggacctgaacagctttggtttctgcatctacaaaataggaaatgccaactctgcccagcctgccttgcaaaattctaaacaagatgattatatgtatatagttactagagtaggagttattaatctagggttcatgggaaaaattcaggggaggttcgtgattttggatgagaagaaaatgatatcttttttaatggaattctaactgaaatctagctaaaggtaggtaacaaatcacagtagtattagcagtaactaactgactcggtcaccagtaggaatcatctattttcctgtcacattatagttggtgcagatacctctaaatatcatttatgctcaccactacttcaaaatttcaggagttaggccaggcgcaatggctcacacctataatcccagcactctgtgaggccaaggtgggtggatcacctgaggtcaggagttcaaggccagcctggccaacatggtgaaaccccatctctactaaaaatacaaaaaaaaaaaaaaattagctgggtgaggtggtgtgtgcctgtaatcccagctactcaggaggctgaggcaggagaatcacttgaacccaggaagcggaggttactgtgagccaagatcatgccactgcactccagcctgagctaccgagtgagaccctgtctcaaaaaaaaaaaaaaaaaaaaaattacaggatttaatagacctgccatgatatcttgttatttaatgtattaataaagaaacacacgtagtaccatacattcagtgttttaaaatgtattttgtaatccaggccccatgcagtagctcacacctataatcccagcactttgagaggccaaggtgggaggattgcttgaggccaggagttttacgccagcctaagcaacatcgtgagaccctgtctctacaaaaaaatttaagcagcagccagacatggcggtgcatgcctgtaatcccagtgctttgggagcctgaagccagaagttcaagaccagtctaggcaacatagtaagatcccatctctacaaaaataattttaaaaatcagccaaacatggtgatgcatgcctgtagtcctagctactcaggagctggaggcaggagggtcacaggagcccaggagtttgaggctgcggggagctaggatcacactagtgctctccagcctaggcaacggaacacgaccctgtctcaaaaaataaaaattttaaaaatgttgtaatcctgtatataatgtgtgagtcaagaagcacaggcattactttatatcagaactttggtggatttttatttttcgctgtttcataaccctgtatattttgttgtatgcattgaagagtactattctgagacaagggtccatggtctgcattcactaaactgccaagacctctatggcataaggaggttgttgccaaagttctctagagaaggagtagctgtagcagatgatcactgtcatctgactgtgctgggtaagtcccctgggctctctaagcctcagtgccctcatatgaaagttgggggtcaaatagtacctgcgtcataggggtaaatacggtgacatgcctcacttgtggggatcaagtgataaactccacgcagagccctggagcagtacctggcacacagcaggcactcaataattgccatcatcgctatgattgtgttgttttatttggactctggctggagttctgtctttcaggacacctctgggctaagggcagctttctccctcccaggttcattcggaagcagggcctggatcggctcttcctggagtgcgacgctcacatgtggcgcctgggagatcggcggatcccasagggcattgccgtggatggcggttcggactggttcctgctgaaccggaggtttgtagaatatgtgaccttctccacagacgatctggtgaccaagatgaaacagttctactcctacaccctgcttcctgctgaggtgagtatctgggaaaattttcccaagaaagataggggcttgttctagcctttgtggcaaagcagatgctgaatttttggcaaagagattctgggtccacctacattgtcctctacacacccagacatccttgctgtcttagcaggatgcctggtctccctccagtctgcacagaggctgcgtggagtagacacacggtgctaccaccggcagtccacacagtgtctttgtgcaaaatagaaaaggcagctcttcctcaagatacttggctttcattggtcataaaaatcacatgatacacagattttgttagaacaagaaccttatggctattttccagaaaactgttatttaaaaaacccttctgacatccacaatgctgatggcacccctaaaaggtatgtagtgtgtaacctgcacaactgtatatgctgaccctttcaggacacacccacatcaactttttttttttttttttttttttttttgagacagtcttcctctgtcatccaggctggactgcagtggcacagtctctgctcactgcaacctctacctccagagttcaagcaattctgctgcctcagcctcctgagtagctgggattataggcgcccaccaccacacccagctaatttttgtatttttagtagagatggggttttgccatgttggccaggctggtcttgaactcctggcctcaagtggtcctcctgcctcagcctctcaaagtgctgggattgcaggcatgagccaccatgcccggccgccacatcaacttttgacgcatccttcacaatgaccaatcatgtaatgaccacctttttacaccaagcatgccttttctcatgttgaacattgctctattattccctgaagaaaagggtgttggtttcataagtcatactccattaatccagagtattctaaaacagtcctagccccatctagaagtggggagggratccagttctgaaggattgtcactgacattcccttagctgcctgccggtcagagctgggttgagggattccagattcatcttcctgacctccaggttgattgcaccctcatttccaatccagcttgagaacagtgcagagctggttccgtttctattgagtctatggcatttctcatgaacggtcccttgttccttcccgggaccacataggttatgtgtgtttctgcaggccacactcccagcacatctctcacctgtgtctggggcagtgccaagctccggggagggctgactgcccccatcacccagagggatgatgagcttgtcatcactgggccaggttttactattctgcacacatgttaagtaatcagcttttaatcctatttcagcaaaaatcaatcacctcttctctcaattctgataacctcctcatccattatattgcagggaatttctgtatcattatgaaaggacacagggcaatcagtaattgggtacatcttcccactgcttgttggagaatgtatgcctccctgggcttgtaggcaattcaagcttaaaatccaggttcatgggcttgtcatttagtgtcacaggaaggtcagcagggggtggcggctggagcctcatttacccacccatccatttagaagagattgtttgggagtttggctatttttaatcaagacgcccaccacgatactggtgaccaaagctccgtgtgtgtgctttcyctgcccctccctggccccagcacacacaagcacatatactccagggtctctgttcagtcccacctcctgcatctctgccttccctcccttctcccagaccacttcaagaggactggtttagaagaaatcagaaggctgtgcccattaacttgtaacgggcagacacagattccccaacagcttcccttagggagagagaacagggaggaaatatatttgcctgggactgtctattatagaaatctttctctcactctctggcagtctctcaagtactccagtgattgattgtttctcctctagtttttcttttcagatccaacatggcctctttctcagatcccttaaagcagttggccaagaatcctgggattagggagaaaatatggcacctggttcagtaccatggacagcaagcagccccacccactcccttccctatgttgccgtctggcgatgcaggaagccctgggtctaatgcaaccatcaatctggtctccctaccccaggggtgaaattccagcacaccagtcagtcagtcagacttgaatccctttgatttgtctgttggacagagcatccgcctgcgctctgagttggaccacatgggcagctgacctcaaatgcatgcagagaacataagagtcccttgacagtcaggtagttgtgttatacatttttgcattgctatgaaggaaaatctgaggcttggtaatttataaagaaaagaggtttatttggcttgcagttctgcaagctgtacaggaagccgcccagcttctgatgagatgccacattcttttaaacaaccagttcttacatgaactcagagcaagggttcaccatttcccacccmagttcatctgtgggaggctgggagaggtctcaggctgggtccctctctcccctgcagtccttcttccatacggtcctggagaacagcccccactgcgacaccatggtggacaacaacctgcgcatcaccaactggaatcgcaagctgggctgcaagtgccagtacaagcacatcgtggactggtgcggctgctcccccaatgacttcaagccrcaggacttccaccgcttccaggtgagactttctcatggtctgccagcctcctaagtgatgccttcccaacaaacctctgcagaaatccaaggccagacctgcaggtcatcttatcacatggtgcccaaacctggctgttgataataatagttaacagtatcaacaatagccagtgtttattgagcacttacttcagggatgttctaaccacattgactcattaacccaaaaacaacaaatgacctttcattattattccattttagggatatgaaaactgtgaggcacagaaaggttaaaaaaaactttccaaaggccatactyatatcatcttctctttattcccttttcatcagaatctcccaaaatatttgttacatttgtacccaggaatatgcttttaagtatatatctagggctgagcttttcaacctcagaactcttgccattgtggctggatgattctctgttgggacatgctgtcccatgcatgggtaggatgcttagcagcacctctggttgagaaaccctcatcagtgatatcgacgaatttgtatttttaatgaattgcacttttctgaggagcagccaggtttggaaaccactgtgttctgtgggaaaacactgtgttctgtgtacttgaaggagtaagaagaggtagaacattatcccctttacagctgtctctgggcagcctaacaatttacagttctggggaagggcagagcaggagggtggggaatgctcatccacttaccatgagccctgagagtgcttggccccaagatgggcaccccttcctgctctgctccctccaagccagcatggtggcttcttcctccagccctccccacacctagcagcagagagcacaaatatgagtgccactgaatggttaagcgaatcactctgaggtcactagagccaccgtgtagagacggtatgctacttcccaaaccactaacacaggaaggcagggacacaatgccaggctcataacccagccaaggtgcccttgatgtggagcgggatgctgtttgtttgtgtttgatctcctctgtgccgggctgtgtgggcattggctttactggggcagacatcacttttattgttcaggtaaggaaacgaaggcatggaggggtgttccaagtggggtttttttccagcagtccctgctgccttcctggtttttgtgcctgtatgaatgcagagtacactgcaggttttctgtcgttcgtattccccttaaggttcccacacagcagctccagccaccttaagctggcagacagggggctgcctaaactcacatcttccctgcagaaaggatatgctgagccgaaagagggttgcaggggaatgtttgtttgacctattcaatgaattcccatgtttggagaggacccgtccctcactgccctaatcgcagagaatcttcatcacttagagcacaaaacctccacgtgctgattcccagagccctgcactcccccaggcacaagcatttgtatcctagcccggcatcctggggacattgtagcctctgacaaggagtgcctcatgtgttcacagcaagcagagattaagaatatcccccaagatctagagtcaagacactgctgcctgtaaggaactcagagttcttgcgcgaagaacttggagagaaagaataatatggtaacgtgccctgtttgttagaagatccagctatggtcggaatcgcaggcagagaaaggagtttgttctgcccctagatgggttcctggtaacaaggggctggtgataataatcaaagagcagcctacactatgtgctagacactangctagtaacccattttaaggatgctgaggcccagagagtttgagtaacttgacctgcacagctagacggtagccaaatgaggatttgaattcaggtggtctaactctctacagtgctaagctgtgctccccaccacagagaggtttcctgaagcagactggcaatgagatgtttagaataacaccaagggtacttacgatcagggggcttcccagtttactcagttgcctcagtcctggagtgatacagtagaaagggcttggattttggagtcatgcatttgggcttcaaatcttacaatggtgtgagtctgtacatatcgctttgcctctctgagctcagttttctcatctgtaaaatgggaatcataatacctgccttgccaagttacagggaaaattagaggtaatgacataagtccattgccctgcgtattgtgtgtggtcagtagttgttgctgctattaatctaccaccatgaaaacagtgctggacccaactttaggtcaataataacactagacaataataagctcctcaagggagagacctgtgttttatttgtctccgcagccctacacaaggggtcagcaaactctagccctgggggccaaagtcagcccactgcctgcttctataaatgaagtttagttggaacacagccatacctatttatttagtctcttgtctgtctgtggctgcttttatgctataaaagcgaagctgaaggtttcaaagctattttaaatatttactgtctggccttttactgaatataaagtataacacctggtagcttacaggtgcttagtatttctttaaccctggaccctgactcttcgtcccatctctgatagtgacttgctgtgtgttctcagctaagtcccttaccatctctgggcctgtttccttgagagtttggttgctatcagtggtcctgaaacactgaatcataatcacctgggaattttttttttttttttttgagctacactccagagctattgactcagtaggtcctttttctctgagacagagtcttgttctgtcacccaggctggagtgcagcggcagtctcrgctcactgcaacctccacctcctaggttcaagtgattctcctgtctcagcctcctgagcagctgggactacaggtgtgtgcctggcctggaatctgaatttttcaaagtcccagagattccgatcccttgtgagtctgcaagttggctgaaataccaaagaggcaatagggcatggtggagactgcagtgagcagaagaacctaggtgctgtctaaaggaacagccacyacccttcagctttaaccagttgttascatgtggagtgtgggcctggggttgccagatctattgctgtttaaagagaagccaaaagaatttccgtgaactctttcatgttttaaatatggctagctaaaatacatctgcaggctgtatttatttgccctagattactagcctgtgacctgtacctaaatgatgtctgagatccatcccagctattaccatctaaaattatttagtttatttaacagacatctaaatgatgcttactaagaaatgatgcttactaagtgcctatchttgctttagatgttctgcacagattaactcacacccttattataacccattttacagatgttgaaactgagaacacagaggtgcaaaaagtatcggagctaattcgggtccagcagagctttgcttctaaccacaggatatgcccttaggttccccccaacccccagcactcgctgatgtggcttttctatttttaatcccatgagtacagcagacagcccggcctaccttctttgcccgcaagtttgaagccgtggtgaatcaggaaatcattgggcagctggactattacctgtacgggaactaccctgcaggtaccccgggcctgcgctcctactgggagaatgtctacgatgagcctgacggcatccacagcctgagcgacgtgacactcaccttgtaccactcctttgcccgcctgggtcttcgacgggcygagacgtccctgcacacggatggggagaacagctgccggtgagccctatatgggatgcagagaggagagctgagaagcaggaggggaggctcagggtacagagtgggggtccttcttcctctttagggatctgcaatgcaatgccaccctatgctttctctcttcctttgcccaaaactcatctaacgccaccctcctagcgtgcgtggcatttccaatccaagctgtgctttactttctcagataccagatatcctatgtacccaatgattttactsattcttcatgctacatatatatactttagaaggaagctttttgtcaccatatcatatgtagcatttgtcttaagtggaaggtacaaaactttttttgatggaaaatgtcaaagatgtacaacatagaacagtggaaccccatgttcccgtcacccagccccggcagtttccaactcggggctgatcttgtttcattttcatcttcacccaccttccgcctcctcccggatcagtttgaagtcaatcccagacatcctatcatttcagccatcaatattttaataatgtatctctgaaaaataactcttttaaaaacattcaccataatgtcatcacacctaaaaatatcacaaagaaaattaataggcagaactattgttgaaacttctcaaccaccccttacaattgtctcatctaccactaactgccaacacttcaggaaagagtgttctagaagatgagggggaggtaggaaaataattcaacataatcccttctcctctcatctctttccctaagccagtcaagactttcacrttgtgtaccctttcttttgttctgaagcaatatgcattttggatatttacataattgcaacaagaattgggtatcctgttttcttyccttggcattatactattagcccccatttctccacgctgctcagtagcttccgcaatgataatgattccttttaatgcctctagtattccattgagcagaagttccagagtttgcttaatctggcccttcactgttgccattgtcagtaatgtacccttgtaaataatgttctgatgaatatcttttctcagaaagccctttttttccattctctcttttgattatttccttaggatagattcccagaagtgcctctaatcactctccttctttttcttgttcatttaacaacatagcatcttttttttttagcgtcagtctctgacggggctggggggaagaagattgttcactaactctctgaaaacacaggcaggtttcccacctggtgtctcatccctggccagcaaggtttccgcagggctgtgacactgtcccatcacctcctcacatccctcggcttctctctccgtaaagtttctgatttagtttaaagggagactagtgtgggttaggaacccaggacctgcagtttaaactctgcttacaagctattgaccttgggcaagtcattcatctctctgagcttcggtttcctcatctgtgaaatgagaagagtaatactcatcatttttgtatcataaggtgttgtgaagtgtaaaggagataatcatcaaaaactacctgatgagttagttatacagtgytcttttgagacagagtcttactctgttgcccaagctggagtgcagtgatgtgatctctgcaacctccacctcccaggttcaagcgattcttctgcctcagcctcctgagtagctgagactataggcatgtaccagcacacccagctaatttttgtatttttagtagagacaggatttcaccaggttggccaggctggtctcgaactcctgacctcaggcaatcctcccgcttcagcctccctaagtgctgagattacaggcatgagccattgcgcccagccttgttattcccattttaacagcattttatgtactaactgctcagggttcaggtcattgctggtatcttagttgccagttgccattatgatgcagccaacagtgaacctgctgtgtgtgatggtaacaattccttgttctctccctgtattttctttgctcactgcctcccactgcacagccaccccttctcaagtcaacaaagccatccaaggaccacctcctctatgacacttattaagatagctcaccccacacccaccgtctcccaagctgaaagtagttcagggacttcaccttcagtatgtgcrgtatcttggctcaaggtcaccagggagtctctctcccccccactgctagtctggaagcagaatccctgcatgtatccccagtagacagtgcrgtgcctgccacttggaaggcaaatgtcgttccataataattacagttgcaggcttcctagaatgtataaggtaaatgatcttacaggaaattccaaaagacacccccaatttatctagggttgttgaaggttgctcctagtactcattttggaatgaagtgagccgtcacattgcctcgagccaggaatcctctggtatccacctcgttttttattgtaatggaactgtggtgccttgctgtgggcaaagccaatgtatttatgaataggagcctgaaaataaatcaggacaaaagacccttatcccaaaaggcagaagagaatggattcctagccccggggcatgtggggaaacagcaagtgaaaactttaacagtctcgttttatctgggtattttaggcaaattgtgcctttccagtctataatataacctttcattaaataatgtttattgatttttttttctcattataaactaacacatgtgcattgcagaagtttctgaaatggcaggttgagagaatcagagtaaagtttgcatataatctaccatccagaaataaggatgtcagcattttattgcaggtccccaaatgccctccggggcaggcacgaagcactagaatcactcagtgtgccccctgcagggtgggctgaccatgggaacctggaggtccatggagctgaaccccagtacattccgtgggaatgcagatggagttgccaaccaaatctcctaattttttttagtgctcatcgtatttaaataagaaagaaaaacacctttgggccaaacgaatacttcggttgcattcctgtagatgatgattgattgtgcggcatcttgattatttttctgttttgagacattaacagttttcattacttagataccaaatacagtcaggatgaggcatcagagggctttgtgctcactccttggttacagggactgtagatgtaacttgaggttcaagagaaaatccttctagaattttcactccttcaataagtactgattgagtagttatcgtgtgtcagcctgtgtgttaggcacggagaattcagccttgatccaggcggaccaggcctgtgaactcaaagccctcccattctagtgtgcagacagacagtacctaagcacaagtaaaccagaatataagatcaataagggtaaatgctgtgcaaaaaatgaagataaagtcatgtgagagtgacaagtcagaggcagcaatgaggaaggaagtggtggattagggtagcaggaaacaaaagggggctagagaaagcggtagggctttgtggaccaggtaaggagtttggattttactgaaagcatgaagcaaagtgcttgtggcatttaagtgagggacgatggacgtggctactatgggaacaggttatagtgggcaaaagtaagagagggtgacaattaaggaagctcctgcagaggcccaggtataaaaggatggtggctttgaccaggatgctggcagtgtgtaaggagaatagaggatggaaggggccaggtgtgatggctgacacctgtaatcccagctactcgggaggctgagtcagggagaactgcttgaacccgggaggcagaggttgcagtgagccagtttcacgacactgcactctagcctgggtgacagagactccatctcaaaaaatataaagaaggtgaaggaggcaagtaatcaaagattgacttctaaattttttggactgctgctttctggaaacactctcttcctttgactcccgtaacagcaaattctcctgctttacccacctcacagaacacacactggcagtgctttgtctattgtcacgataacactgtgaaacaaacaactcccaaatcagtgttttgaaacaatatgcattcatgtaatgctcaagttcgcagatcagctggacagttttcccagtatgggcaggccttgctcccctatctgcagccaactgcaagtcgggaggtggctctgtggtccttggctgggaatagttgcctgagcctaggatggcttcagctgggacaactggcgtagctctgctgtttcaaatgtctccttctccagcaagctagcccaggcatgctctcatggtgacctcaaaagagcaagaaagcaaacagaaatgtgcaaggcatcttgaggccctggctcagaactgacgtgacagcccttctaccactttctgttgtccaaagaagattccagaggtagaaaaataggttctgcctcccgggtacaaggaaacttgcaaagtcacatggaagaaagcataagataaaggagatgggagatttgggacattaatgcaggtgaccactggctctttcatgactatctttgctgtccaatacggtagccacaagtggctacttcagtgtaaattaactaaaactaaatacaatttaaaattcagttcctcagtcacattggccatatttcaagggctgaacagtcacactttgctagtgggttgggagacagctttcccaaagtctcacaaatcatcactaaagaacttactcatgcaaccaaacaccacctgttccccaaaatcctatggaaataaaaagcttttggcctggcgcagtggctgacacctgtaatcccagcactttgggaggccgaggcgggcggatcacttgaggtcaggagtgagtttgagaccagcctggccaacatggtgaaaccccgtctctactaaaaatacaaaaattagccgggcatggtggctgatgcctgtaatcccagctactcaggaggctgagtcaggagaatcgcttgaacccaggaggcggaggttgcagtgagccaagatcatgccactgcactccagcctgggcaacagagtgagactctgcctcaaaaataaataaataaaatatttctgtcatcgcaggaggttttatgtgatagccctgcctagatgttgctgcagtggtagaatgacagcacagtcgctggactttccactcccaaagtccagatttaaaacaggtttgcatgaacggtgaatgcccaacaaaccatctgaagactgttcaagtttttttttttttttttttttttttctatgctccctggaaggcatcccagtaacaaggcaatgatttcaggagatgtgtgaacacaggaaggcagcttccctaactgttataattggacataaagacttaaaactccagatcaggaccagagggaaggctgcgtttagctgagcagggacaatgatttgtgaaatgctattatgaaggacccacaagcgccttataaagctgtgcaatttacacattgcagaagcggcagctatttatctgacaagtaggaaatataccaaactggtctcctccgaggtactccttttttgccatctgcttcccccttttctccggacatctctgcttcacttccctgcccttttcagccagcaagtttttgtggatcaaagacgtgcattttaaaacaacaaaccacttttgcatgtatgtgcatgtgtgtttatctcagattggcaatcatggttaaagatgataaccagtgtaagtggtaaggactgtgagagaataaatcagtacttctgaaacagttaagctgcagacacgaagagcctcagacatttaaacagagagagagacgaatgaaaggttttgctcaaagatgttgaatgcagcattgtttagagaagcaaaaaattagagttatcatccaatgctagagaacttgctctatcaaatctggtattaactatgatgaaacacaccgagcatcaacacatacaaaatcgtgtcttcagagacttttcaaagatgtgataatcctcaggaaatactatacaatgaagacagaataatagctaggatagatagatgccaactatgtagtatttatgcaaatagtatttatgcaaatagatgcataggaaataaggccgaagggaaatccatcaatatgagtgttcacacaccattttcactgcccggtaccaagcaccagaggactcaatatctgtgaatkgacattatgtatgggaagaggcatggaaagtagtcatttcactttctttgttgtactttcctacagtcagcatgtttttcattcayaatcagcagaagaaaaaagtattcatagtcattgagatcatagatacagaggacgcaaggaaaacagtaggcattgtgcacaatggggactgctttaggaacaaaactagcttggtgggtggggagcctcactgtgatcctacacmccttgggccctaatgcatgagcgcctgtgttttcagatactacccaatgggccacccagcatctgtgcacctctacttccttgctgaccgcttccagggctttctgatcaagcatcatgctaccaatctggctgtgagcaaactagagactctggagacctgggtgatgccgaaaaaagtcttcaagatcgcaagcccacccagtgactttgggaggcttcagttttccgaggtaagaggccaggtcttgtcacatttcattgtattttgcatttccctcggccagattctactccactatctgacacttctagttggagatggaggagaaraggacttggagatccctaaagataagctaaccctgtgcccgaagaaggttctccggccccagtcactggcaccagcatcttaaacaggggaggatcaaaccaactggaacacagwtgtattttttagggtagaatttctgctcctctgaatttttccagtgatgactcctaaaccaatgtcagtaatattagtcccattttaccgaatggagaactgaggcttatagagatccaaagattttctggattgctaggaagtgggagagctcaaaattcaacctaggtctctttggccacaaatcctatgcttagttgtggttttgtctccacagtttttagcacacctggattcgctcaagggaagtaccagatcaatcactgaatatatgattagatgagtagatgaatgatggattgaaggaaggatggatggacagatgggtcacatagctagctttgtttttgatcattctgatctaaatccaaatgatacaccttcagagaaaccttccccggcacccacttaagctgctgcaatagctacattctccayccaacccttccctattttaatactttttcttagcatttactatctaaaattatcttgttgctttatctggtcactcattgattgttcacaagagagctggaactgtgtctccctcttcactgcggtatccccagcacacagagagtatgtagtctttgtagatgctgagtaagacttttgaatgaatgaatgagtgtacttgggtcgtggtgcaggaaggaaggggaagcatgatcaagcctggtgcgtgttattcacacaaaactgcagcacctggtttctgccttcctcacatccctaagtgctaaggwcgtgatttgtcacaatggttctgactgctggattagggaccaagagtctgattgtagactatggtacatcttgaggggctaagagtatgttggggagagggggagtcccaccctcttatattttccttgacagtccttctctagcttctgtggccctgcctaacgaatgtatgtatccccatgacaaacaggcaccagtgagagtttcttgttaagccactgttttcaattaagactcccagtggatttgctggatgtgagcagccaagggagcccattccataaattactggcatcagggggcaattagatactgccccagttsgattctgtgctaggggcctgagcagccaattgacaacattaatgtcccattaaagagatgaatgcctggtgtctgggctctccctgtttatcagcctgctgttgggtgactgggtacttctggcagtgacaaatgatgttggccgctccatggctagtgcttttggggggtggtcttcactacacaggtctggtacccttggagtgagaaccatcaaaatcactggcaaaaataacagcatgtgatgcagagagccctaacttgtattttgaattttttctaaactcttaattttagtagcaaatgaacagaaaggcaaggaagaactacaggaccactctgtgggctatttaggatctccttggtgttagcactatcccagggccttgtayagtgcctggctcacagcaggtggctgaacagctcagatacrtttctccaatmcatgggaatctcatgctgttgacttggaaataaaagatgctcattctttctgcaggtagtcaccaagtgcctacagtgtgccaggttcaggagggattgtggtgaaccaaacaaaccaggcccctgtggtcatggaattgcattccaatgagacagccagccartgagtgagcaaatagataaacaaaaacaaacagctcagctaatgacaggtattctagagaaaacttcattcatgtgattgctggggactcaggacattgatggggacaaccttcaatagaatgattgattcatctaggaaggcttttctacggagatcactgcaaagctaaagcctgtaaaagagccagtcctcgggagatctggagcattccaagcagagagaagagcatatacaaaggcccttaggcactgggaatgagctaggagtactcgagttgcagtgagaccaatgtactgggtgcagcaagtgagaaggaaactggtaggaaagaggcctcagggagtagtcttgcaggcccgggaaagatgttcaggttgtattttaaatgcaatggaaagatagagggaaaatggcagataggaggcaagacaaacttgcagcttccactcggatggacagagcagtgtatggagccccacatcatgaacttttgctccaagaactactgcagaaacatgccaggaaagccaagagaatccatagagcctttgaaggaggtggattgcccctgcaggcactgtgggacagccaaggaattgtgaattggcttgctttaacatccccaaaagatcacactagctcaccagcaatggattcaaatcaagaagaaatctctgaattaccagaaaaacaattaagaagttcgactattaagccaattaaggaggcaccagagaaaggtgaagtccaacttaaaaaaaaagatataggatatgaatggaaaaatctccagtgaaatatagcctaaatagaacacaatcacaacttctgaaaatgaaggacacacttacaaaattgcaaaatgcactggaaagtctcagcaatcgaatcaaacgagtaaaagaaagaacttcagaacttgaagacaaggctttcaaattaactcactccaacaaacacaaaaaatttttaaaaaatgaacaaagccttcaagaagtttgggagtatgttaaacaaccaaacttaagaataattggcgttcctgaggaagaagagaaatctaaaagtttgaataatggaataattgaggaaaacttccccagccttgctagagatctagacatctaaatacaagaagttcaaagaacacctgggaaattcattgcaaaaagatcatgcctaggcacatagtcatcaagttatctaaagtcaagacaaaggaaataaccttaagaggcaaaagcatcaggtaacctataaaggaaaacccatcagattaacagcagatttctcacagcagaaacactacaagccagaagggtcctgtctttagcctccttaaacaaaacagttaccagccaygcatcgtgtatccagtgaaactaagcttcataaatgaaagatacagttttttcagaaaaatgctaagataattcaccactaccaagccagcactacaagaactgctaaaaggagctgtaaatcttgaaacaaatcctcaaaataaaccaaaatagaatctctttaaagcataaatctcacaggtcctgcaaaacaacacaatgaaacaaaccaaggtattcaggcaacaaatagtatgatgaayagaatagtacctcacatctcaatactaatgttgaatgtaaatggcctaaaagcttcacttaaaagatacagaacggataagaattcaccaaccaagtgtctgctgtcttcaagagacttgcctggcacctaaggactcacatgaacttaaggtaaaaaggtgaaaaaagatactccatgcaaatggacaccaaaagtgagcaggagtagcaattcttaccagacaaaacaaaactttaaagcaacagcaattaaaaaagacaaagagggacattatataatgataaaaggactagtccaacaggaaaacaccacaatctaaatatacatgcactaacactggggctcccaaaacaatactactagacctaagaaatgagatggacagcaacacagtaatattggcacagttcatcaagacagaaagtcaataaagaaacaatggacttatgctataccctacaacaaatggacttaacaggtacttacrgaacattttacccaacgactgcagaatatacatgctgttcatcagcacatggaacattctccaagatagaccatatgataggccacaaaacaagtctcaacaattttaagaaaatcaaaattacagcacatactctctcagaccacagtggaataaaattggaaattaactccaaaaggaacccccaaattcatgcaaatacatggaaactaaataacttgctcctgaattcaacacttctgggatacagcaaagccagtgctaagtgcaaagttcatagcattaaatgcccacatcaaaaagtctgaaagagcccaaatagacaatctaaggtcataccttaatgagctagagaaacaagaacaaacccaaacccaccaaggagaggtgaaagacctctacaaggaaaactgcaaaacactgctgcaagaagtcatagatgacacaagcaaatgtcatgctcatggatgggtagaatcaatattgtgaccatgaccatactgccaaaagcaatctacaaattcaatgcaattcccatcagaataccaccatcattcttcacagaactagaaaaagcaatcctaaaattcatatggaactaaaaaagagcctgcagagccaaagcaagactaagcaaaaagaacaaatctggaggcattgcattacccaaccttaaagtatactataaggccatagtcaccagaacagcatggtactggtataaaaamaggcatatagaacagtggaacagaatagagaacccagaaataaagscaaatacttactgatcttcaacamggcacacaaaaacaaagtgggaaaagaacaccctattcaacaaatggtgcagaaataattggcaagccacgtgtagaagaatgraaccgaatcctcatctctcaccttatacaataatcaactgaggatggatcaaagacttaaatctaagacatgaaaccatacaaattctagaagataaaattggaaaaacccttctagacactggcttaggcaaagacttaatgaccaagaacccaaaagcaaatgcaacaaaaacaaagataartagataggacttaattttaaaagtttctgcaaggcaaaagaaataatcagcagagtaaacagacaacccagagagtgggagaaaatctttgcaatctgtagatccaacaaaggactaatatctagaatctacaaggaactcaaatcagcaagaaaaaacaatcccatcaaaaagtgggctaaggccatgaatagaccgttctcaaaagaagatatacaaatggccaatgaacatatgaaaaaatgctcaacatcactaacgatcaggaaaatgcaaatcaaaaccacaatgcaataccaccttactcctgcaagaatggccataaccaaaaaataacagatgttggcatggatgtggtgaaaagggaacgcttttatgctgttggtgggactgtaaactaggacaaccactatggaaaacaatgtggagattccttaaagaactacaagtagttctaccatttgatccagcaattccactgtgggctatctaccagagaaaagtaagtcattatacaaaaaagattcttgcacacgcatgtttatagcagcacaattcacaattgcaaaaaatatggaagcagcccatcaatgagtgaataaattgtgtgtgtgtgtgcgtgcacatatatatatatataccccatggaatactactcagccataaaaaggaacgaaacaatggtatttgcagcaacctggatggaattggagaccattattctaagtgaagtaattcaggaatggaaaagcaaacgttgtatgttctcactcataagtgggagctaagctatgaggaaatcaaggcttaagaatgatacagtgagtttggggactcatgggcaagggttgggggatataggggaggggatataggggataaaagactacacatggggtgcagtgtatactgttcaggtgatgggtgcaccaaaatctcagaagtcaccactaaagaacttattcatgtaagcaaacaccacctgttccccaaaaacctattgaaatatatacatatacatacacattataaactcaaaaaataaataaataaacgcaatggaaagccattggttggttggaagccagggagccgtatgttaagcttgaatttgaatatgtatttgaatttgggtaattgaccattctgcagtggatggtggtggacttccacaatgaggccccttgagaaggtcttggaggatgtgacagcagcagggccctagctcaggctgccccacacctcacccttcacgctcctcggttgaaaaacaagatccaggttgtttgtcagctgctccagaactctcctgcccaggttatcttggttttaaaactcgatttcagggaagtgtttatcctcatttctttggaggatccaagggcagtgttctggagggttcccatcttcccctaactggtgaaaaatcacctccttaaatatgaccctaaagtagttttgtggccattcatctgttttgttagtatctgttggaaactagtgcatggagggaagtccatgtgttcagcccctactcattcaatatgtgttcaagatagattgatagacaggtgatacatagattgattaacagacagacagatgggtggatacgttaataggcaaacagatggatagatgattaatggwtacaatagagttgacagattaatgtgacagattggtagagatagatgataaacacacataagtagatgatcaatctgtatagatcattgatcgatcaatagacaataggtgctcaatatatctttatttttagatctctatagagatatattgagcacctactctatgttcagcactgtttcagacactagagacatattggtgagcatgccatatayagtccctgccctcttggagttgacggtctagatctggagagagagagacctgtaaattaaaagatgcagtactgtgggggtcaggagaaaagctatgatgatcaaatgcttagagatgtacctcagtggtgcctctatccaggaaagacttatgagtagaggtgatgcctgagccaaaatctagattacaagtttgaggtggcctggaggatgcggggaaaggtagaccggtccagagaacaggcggatcatggccagaagatcaagaggaaacacagagcccttcaggatgaggtgctgggartaacccagggtggcctggagcaaggagcaagtggaagggagggagagggatagagatgacagaagtgaagccggagccagaccagaaaggtctccaggacaggtaagcaactggacttagaaaccaagagttgctgaaaggggttgtaagcaggaaaatagaaatcgggtttctttagaaaaacctctaagaccttgaagcttgaactgaatcctgttgatcattcatttattccttcaataaatagtatccttttaattcctactgtgttccgggcactatgctasgcactggwgggtcccagaaggtgctggtccctgctgatccacagggtagtagaaaaataccaagatttcataagtctgggagggatggcagcccccacaggaacatcagagcrgtaactacctctgttactctcaggatgctttcttagtcctaatctttagtctctggcctgatgaaaactgaaagcaagacacatgccagtgagtgtacacagayggcagccacccctggtaggcagtagggatttggtttatgtgtgttgggtgaatgaatgactgagagagtgaatgaattcatgaatggaaggcaatatgtagcacagtggatgagaatgcagcctctggggytggacttyatgggttcccatgctggctctgccycctcygaccatagcgagttatctcacttctctgagactcagtttccacatctgtaaagtaaagataatgacaagggtctcccctttatggatttgggagtatcaactgaatggacacgtctgcctggcacactgtaatccctcagcaaatattagcagtgaagctctgtaagctgggtaaagaatggactgacatagtacctcttgcaagaacaatgagaagctagatcagctcctatttcccctgcacataggaaatctcagaatgtaggtatgtgtatccacacccgaccttcgtgcacacacacattagagatgctaattatgggaagacagcagaggcagtgcaagcttcatactgtacccgttatttgccccaacatgcccacatgctgtgtcctcaaaaccactaagttaatccacctgggggagatctttttttcaaattagatgacccctaatttaatttgatttgaaatagcaacaaaggtccttgtcaggaatctccctagttcattcagtttttggtcaagccattcacccattcattcaacaaacattactcgagcacctgctgtgtactaagcatggtagtaggcaccaagaaagagcagggaaccagccaggtaaaacccctgttcacacagagcttatattacagctggaggagataaagaataaatacatcaacagacaactctgagatagtgcttatcaccactgataggaagaaaataaagcagtagggaatgacacagattgactgaaggtccatttgaaatttggggtggggggtggtcagataaaaactctgtgaggcagctttagacataaggggctggctgtgcaagaaaggagtattccacacagggcagatggtgcaggaaagctgagctgggaatgagcctgccttgattgaggtggctaaaacaaggcatcctggagaaagatggggagggggtcatggagatggaggatggggtgagctcagactctgagtgcactaagaagcctgggggcagcagtaagaggacattttacaaggcctttctgactacaggatatagaagaaattgcaggtggcacaagtggaaggagggaagcccaccagagaggattgctgtgggtcacagctgcacacacccccagctggctggcaggaaggaaggatcgcaggatgactctcatgcttacrgtccagatctaggtgccttgggaaagccaaagctgtctcttcctaggaaacctatttgaacccctgtagatgacaggcaatgctgagggtctctagcttatgatagagcagctgtaaaamcatgatctctattcttgttcagaaccattgcaccaagtggaggtgtgtgatttagaaaaccaaggatggaattggaaacccgctgtacctgttgagtggcagggtgtatgtttctgtggaatggcctgcaagcaagacatgcattcattcattcattcattcattcattcgttcattcattcactcattcagctcatgtgtggttttcttttcaaagcacatgccatacaccaggcacaggaggcccggtggtttaataaaaggaccacaggccttttgatccttcagactgagtccagatgccagatcttctgcttacaagctgtgcaamcttgagcaggtgacttagttggagcctcagtttcttcatstgtaaaatgggtatatgaaagctaacaaaggggatcctagacctttytgagacctagccccctagttcaggcccagtgacttcagaattcactyccctgtttcaggtcggcactgactgggatgccaaggagaggctattccgcaactttgggggtcttctggggcccatggatgagccggtgggtatgcagaagtgggggaagggacctaaygtgaccgtgaccgtcatttgggtggatcccgtcaatgtcatcgcagccacctacgacatcctcattgagtccactgccgaattcacacactacaagccccctttgaacttgcccctgaggcctggggtctggacagtgaaaattctccaccactgggtgccagttgcagagaccaaattcctcrttgcgcctctgaccttctcgaacaggcagcccatcaaacctggtaagtactcccagtgtctatgtgggagaaatactccttccctggggaccttgagggtctttggtgttggtaggcagcactgctcagacatagggtaagcagcggcctcacagaacagcactccttgctctcaatacttttctctgtgtttccctagagaaaccatctaatgtcctacctgcacacggagatgatgtcatctgtctaggtattaggtagctatttgttagacgctcccccattcaacttccagaaggcctagatcatactgaagacaagatgggaaataaacccaggcaggtattaaggatcagcaaatcttgtttactatttwaaaaaaatcaaaacaggaaattctgttcatcaaaaatatgatacactaggtggaaaagatgaaccacataatagtagaagatatttgctacatttttttaaagtactcatgttcagaatttataaagaaatgctattcatcagaagttggccaatccagcccactacctgtttttgtaaataaagttttattgraacacagtcaccatgctcattcatgtacatgttgcctgcttctgctttagagctacagtggcagaactgaatagttgtgacagagactgcatggcccacaaagccaaagatactatctggytctttacaaaaaaaaagaccaccaaccctgctataaaagagaggaaaaaaatggaggagagaacatgaatggcccctcacacacgcaaaaacatgttcagcctcattaaaaatgggagaaatgaaaattgaaagcaaagagaggttccacttcacacccatcatattgggaaatgcgtgacagataagaacctgtgttactaaggctgagagcaataggcattcatgcagtgctagtgggagggtgaagtgctaagacgagtttagaaaatgttttagtatctcctagtaaagctgaacatacacacaccctaccacagacgtctgaccccaaggtataggccctagagacatgtgcagaaatgctcacatgagaattattcttaatagcacaaaaccagaaacggtctgattgcctgacactggaaaggagaaacaattggctggctgttcatacaatggagtactatgcagccgtgaatagcagtaaagcatgggcatgtgttggcttggatgagtccctaaaacatagtgttgagggggaaatatcacagataaatcataattatgatgtatttatgtcaagttcaaaaacaggcaaagtcaacaatatcttatttcaggagtcgtatgtcaaaggcagctgttaggaaatgaaacatgaaattaacatgaaattcaggtcagggtttccatccccatggagaacagggactgggatgtcagttcctatcctgcctgacttttttctttgtccattgaaagggtttacttttatccttctatttcccccgccccttttcacctccttttattaaggggaaagtctttctccctgctcaaatcctacctctagagaaaccactgccaacagtctggtgtgaatccttttagaagtttttccatacttttaaagcataaacataatacacaccataaatcacaaaacctttgctattttttaaaaatgaaataatacattgtgtactgtaagattgtttttttttttttttttactttctaagtcagtatatataaagctaccagctacatgatattccactgggttaaggaaccacaatctatctgttcccctattggtggacacataagtttctgttgttgctgctgatgatgatgatgttactgataatactgcaaggaaaagtctttttttttttttttttttttttttttttaatataacagaggttggctgggtgccatggtttacacgtgtaatcccagcactttgggaggccaaggcaggcggatcacttgacaccaggagttcgagaccagcctgaccagcctgaccaacatggtgaaaccccatctactaaaaatacaaaaattagccgagtgtggtggccggcgtctatagtcccagctacttgggaggctgaggcacgagaatcgtttgaacctgtgaggcggaggttgcagtgaaccgaaatcatgccactgcactccagttgggtgacagagcgaggttctgtctcaaaaaaaaaaaaagaatttaggtcaggctcttttgcctaggctggagtgcagtcatgcaatcatagctcactgcagcctcgagctcctgggctcaagtaattctctcacctcagcctcctaagtagctgaaactacacgagtgtgccaccatgcccggctttttttttttttttttttttttttaactatttttgtggttgtgtggtctgtgttgtcctggctggtctcaaactcctggatctaaaccaaccctcccaccttggccacccaaagagctgggattacaggcgtgagccacccaccacacccagccccaacaaggaagagtcttaaacataaaattgtatgtgcccagccgggtgcggtggtcacacctgtaatcccagcacactgggaggccgaggcaggtggatcacgatgtcaggagatcgagaccatcctggctaacacagtgaaaccctgtctctactaaaaatacaaaaaattagctgggcatggtggtgggtgcctgtagtcccagctactcgggaggctgaggcaggagaatggcgtgaacccgggaagcggagcttgcagtgaactgagatcacgccactgcactccagcctgggtgacaaagcgagactctgtctcaaaaaacaacaacaaaaacaaaaaagaaaaaaaaaattgtatgttcccatgcagttacatccataacacaaactcgtagaaacaggatttctgggtctctctatatttggaattattcatgtccatctctaacagatcacaaactcaaaagccagaaatgcattacagcctcttagctttgaagagttctggattgggtgccttttagccaatgatgcaaggggatggggacacagcatggggaggaggtgccttgagtcctagcaaagggagttgtttgggaaaaactctcaaaccacttttcctctgctctcacactgccatgatcaacacagaagatttctgtgacagcaaaatacatggggaaattttccccgtcagcaagcaagcaatcagttctgcagcagacaccagctgggtgtcccccaattcagttccaacactctccaccccagaggtagcatcagacaccrcagagtgagggctcagtgccataagaccacccccttctgcccgctaatcacaagtctgggcctttggaacttctgaccaaatggtttcaaactggggttcccacaaccccctctttgggctcaattactctgctagagcagctcacagaactcagggaaacacttatgtctattggtttgttatgaaagatattttaaaggatgcagataaacagccaaatgaagctatacagagggcaaggtccagaggagtcctgagtgcaggagcttctgtccccatggcattggggtgcccaccctcccaacaggtggatgaatctgtccccatggcattggggtgcaccaccctcccrgcaggtggatgagtctgtccccatggcatagggatgcccaccctcctagcaggtggatgaatctgtccccatggcattggggtgcaccaccctcctggcaggtggatgagtctgtccccatggcattggggtgcccaccgtcccggcaggtggatgagttcttcctcaccttcctgtgaagatgctaccatgtattcagctctccagaagctccttgaaccctgtcctttgggccttttatgaagacttcattggttacccatgactgaagcatgacaactgtgtcaaaatgtgattggacaaaaagggtctgacctaactcagcaagccctgtctgttcagattctccttggcctctctgtgcagtaattccttcctccagggagtgtgtcagggccctctctggaatgagagtcctatcacccacaatctgattagactctggcattaggcagsagaagggggacaggaggaggccagagcgagagagagattctatttgctgagtcctaaagtgcccaacattgtaagaaaagactgtaagaagggttacaggagttctgagccaagaaccgtggacaaaaaccactatcatggcckggtgcagtggctcacgcctgaaatcccagcactttgggaggctgaggtggacggattactcaaggtcaggagttcaagaccagcctggccaatgtggtgaaaccctgtctctcctaaaagtacaaaaaattagccaggcatggtgacgggtgcctgaaatcccagctactcaggaggctgaggcatgagaatygcttgaacctgggaggtggaggttgcagtgagccaagatcacrcyactgcactccagcctgggtgacagagcgagactctatcatctccaaaacaataaataaataggccagacacggtggctcacgcctgtaatcccagcactttgggaggctgaggtgggcggatcacctgagctcgggagttcaagaccagcctgaccaacgtggagaaaccccgtctctactaaaaatacaaaattagccgggtgtggtgacgtgtgcctgtgatcccagctactcgggaggctgaggcaggagaattgcttgaacccaggaggtggaggttgcagtgagctgagatcatgccattgcactccagcctggcaacaagagcgagactccgtctcaaaaaaagaatcaatcaatcctctatcataggagtctcgaagtaaacgctcagcttctgctgtctttgtgcagagcaagcagaaagayagagacctcatgttttcttgagctggaagcctgctccttcttccccatgaaccaggcaaaagacagcccctccagagctgaccaggcccaatcccacccccttagaggtcttaggttccttcttgatcwagttcacatctttaccatctctaacgatgtctaatgccagacatggaggagaggggagtaaatggctgtgtcttcgctgcttcaggtacacctgttggacagaatgaagcagtgctcctgaacacacccccacgccagtggagtagcctgggggccattcatggggtcctgatttttccagtgttttcttctagagtttctaaggaaggcagggctctccctacacatgcccaggatgacccaggartcattttacccccaccgagagcagccctcctgtccttggtaattgtatttgttagcgatgttccaatgaatgacagtgaacacaaaggtgggagcaatgcaatttgtaaaatgattcatcaagagtaattttctattgatgcgtccctggtaatcgcaagaaatccgatgaggtggaattgaggaaaatttaattatagagacgagcatcgcaagctaatattgtaatagcgtttcccacattaacctcatttctcataagggtttttttgcatcaaccacaatatttggctcccagcgttcgcakgtttgttagctgctcttttccctttgaatgtcctgccttttgtcagtttcggtatctcctcattctccrctttctcactctgcagaatagaggcactaaggggctctgatagagaaattagggcccrcaccaaagacagcaggstctgttctcctggcaggtggggctgaagctgcccaccctaccctgtattagagaaagatgggttaggaccagacttccaaacactgtggctcctaactaccgtgggagaaagcagctttgctaaaccccttgcgagacagagtatgtgctcaatgactgctcacctccttcctcccacttgtgcccatccaaaccacagaacccaacccttttgcttcctggggcattgggaattgaaggagtggcgatcttgtctstgttagtcaaggcaaattttgaattcatctactattctcactgcttttagaagggttagcatatggtctttcttccttcttcttgcctgctctggacacttgttaatatccaggctgtcctgggtgcctttggtggtggcagctgctgtcaggcaaacaggaagcactgtcttctgaacactgcattatcttggaaggtttcttgtaatcctagctatctcagctctcgcaaagcctgatttggtaaagcgcaactcaccagactcattggccagcctttttaaaaatatatatgtgcttctactgagcaataaaacaagcaatgaatgtgaacgtcttcaaaatattagaaatagcatctattagaaataatagaagtgtttagcttctttccttcaccccaaattgctatacttcctgattcctcatcgtgcagccctgggaggtagtagtagtagtcactcttacgtacatgttactgtttaacccatttatgcctgaggttgcaatttttaaaatttttttttgagatgaagtctcactctatcgaccaggctggagtgcaatggtgtgatctcggctcaatgaaacctccgcctcccaggttcaaacgattctcctgcctcaccctcccgagtacctgggattacaggcatcagccatcacgcccggcttatttttgtatttttagtagagacggggtttcaccatgttggccaggctggtctcgaactcctgacctcaggtgatccacctgcctcagcctcacaaagcgctaggattacaggtgtaagccatcgtgcctggcccaattgtttgaatttttgcatgagtgaaaaatcagaccttggtgatggccttgagcagtagagtatcagggtgagtgataagcactgcctttggagtcagtcggtcctggatttaaccccagatctgtctctaactccagctgcctctctttccccatctgtaaagtaggaatgataaaaccagccccctagttttttaggtgtgtgaggattatggactaataccaacagtaataatcctagctgtatttgtctgttctcatgctgctaataatgacctgaggctgggtaatttataaaagtaagaagtttaatggactcacagtttcaatggtcagggaggcctcaccatcatgatggaaggcaaaggagaagcaaaggcacatcttacacggtggcaggccagagcgcctgtgcaaggacactcccctttaaaaaaccatcagatctcatgagacttacttattcactatcacaagaacaacatggcaaaaactcatcatgattcaattacttcccaccaggtccctcccacaacacgtggggattctgggagctacaattcaaggtgagatttgggtggggacacrgccaaaccatatcactagctaagcttttcccagcacttagtatatgccaggtgtcatttgtaaatactttatatgagtcagcacacttaagcctcacaaagtgagaaggaaggcattagtactttacccattttattgatgaagaaactgaggtacaaggcatggaggtcagaagtcacacacctggtatgttggacgtggggctgcaaaaccagacagcatgactgcagtacctgggctcttgtatgaagtgcttcacaaagtgactggcacataggaggggcccagcaaggcagcactgttatgagagctagtttgacctcccaccccacctcacccgggtccaagcttcatgctttcagagtgattgttctgtggtcagttcatgcacccttaggcttctaggaagcagaaatccaacttacgcagagtacaaggtggacgctcggcagctgagatctggacttcccaaacagacctgggtacaggtcactgtcactctccaacccaggagtcagcaaaatttttctgtaaagggctagatatattttcagcttgttgggtaaaatacagtctgtctcaaatactcagctctggtagcacaaaagcagccacagacaatatgcaaataaatgggcacagccatgttccaataaaactttatttacaaacacaagtggtgggccacatttggcccaaggactgcagtttgccaaccctcttgtctcaataccctgtttttttgccttcatgacacttatcactgcctgaaataaccttatttatctacttatttctttgttgttgttctccctccactggatcttaaccttcctatctggtttgctccaccacctagaatagatcctggtacctaataggtacttaatatgtctttatcaaatgagacagtgccttgcagatcatgggtgtttagtaaatatgtgttgactgaatgcctggcacaatgtaggtgcttaaaaatatatattggctgaatcagtgtctgcactatcaaagatgcgctataaacatgtgttgaatgaataaaggcatgcaccgtgccctgtacaaagtgggctctgtccttacgggctcagttttctcagctgtgaaatgggactgctaaaagaacttcctcatgagattgtcatgtgaattaaatgaggcgatrcatggyrcccagtgcagcaccaggcacagggtaagtatgaataggcatcctattggtggctcttctgatcctgaaattgttccctttggctttcagaggaggcactgaagctgcacaatgggcccctccgcaatgcctacatggagcagagcttccagagcctaaacccygtcctcagcctgcccatcaacccygcccaggtggaacaggcacrgaggaacgcagcctccacgggcacagcgctggagggatggctggactcgttggtgggcgggatgtggactgccatggacatctgtgccacgggccccacagcctgcccggtcatgcagacctgcagccagacggcctggagctccttcagccctgaccccaagtcggagctgggggcagtcaaacctgatggccggctcaggtagcactgggcacraggagtgggccacagcaggatctcaacgggaaagcagccagaggggttgtggggcctgaaccccggcctcccaccctgggggaggccctctgtgaatgggtctctcctggccatagaatgatggaaagggaaggtcagcaggtcaaagcaggatcagccaacaacctgcctttggcaagctgcgggtgggatggctcagtccctgcactgtgactgtctcacctcttctggttgatcctcaagtcctacaggttccttgtcttccccttccagtgacccacccctgaccccagacgtgtgattttcagacttttctttcgagcagcagaacttcgtttacggagcacagtcataagtggaggttcagggtgctgacgaaatccaagctgctctggttgaagctgacaagtgcgaggttccctcccaaagctcagccctctgggcggtccccttgcccagggtatctcctacggtacctcttcagaacccaagggctctgcaaatgccagtttgacaagcactgcccagaccaaccatgggttcaaactccagccctgccctttggttcatttttctgcttctcttggctgggggactctggtgccagccttgaaagtcatggtcgtgggccctttcccatggaggctgcagccttaggagagctctgagcctctcagcagccctccttgggttgaactattctccttagtaactaggtaagtgggaaagccttttgatgtggcatggccaaggtccagccacaagtgcaactgccacctgtccaggggtctgggcctccttccctcaaggctgccacacaaagtagcagaaataggatgatgtttgtgagcaccagactcaagaccatgaccttctttgatccttgaaaatgggaactttgacagccatgaccatgaaactcacaaggcaacgcgatgaaactcacaaagcaatgcttggagcaaaactcctgagctagacagcacagcagcacccatcccctgccagagcccttccgttctgaggtcagacacacaaaaccttcgtcaattgcacaccggtgctgttgggagtgaccaaaccacatgaaccagacttttcccgtccaggaaatagcatttcagatttggtttttaatttcatgcccttcggccacaggctcaacgggacatgcaacataaaaatgggaaggttatttaaacaacaaaaaacagtatgatttaagtgttgagttaccagaaacccaaaaggtttccttgccacgagccccctggagtgtcatccctgttcaccaggagagctcttcgcaggaggcctcccttgctcctgtaatcccacctcccctgaatgatgggattcccttggaaaaaggtctcacccctggtagccatctgcccttcccatggagagccagtcctgacacttctctccagcgtgggtttgaaggggctgcccttcgctttgtgtgacttgtcctaatcctagccagatgtgttgccccatcccaagcctcgcaaggcagggtgtcctgttggcaatggaggacgtagagaagggacactttagatatttattatttacatgttttagtcgatgactaattagtaggtgctgtttttgcagcttgtcaattatgttaccttactaactgaagctgcctttattcacaaaaggccccttttcccatcttttcccaccccctggtgtctctctctctctcggtttctctttctctgcgtctaccccccatcctcctcatcctcagagtaaagcaggggcatcgaacaccacgcaaagaaagctccaacccgcatcttccactggctttgagtggggtgccttggggaccgttggagccttgttttttcccttatgcagagtgtcagcctcactctccctcggattccaagagtattggaattcctgagcctcccatcctccccctactcaccccccgtcacaggcacaaggaggtgacaggcagaaaacgtggagggtgagtggggaatgtgctagctgcagagagtttgtggggaatgtgctagctgcagagagtttgggccattcctgcttgctccgtggttgccttcccatggcccatctaattatgggcattcatgcgaccttaacagagggaaacaggctcctttgagagagatccatcttaggaggagggtcgtcagatccaggcagcagagtccgggagatagccattctcaacagcgattccagggatctcagggtacttttctcagaaagcccctatgatctcttttacagactctatggtggccacgcgctgggtgccacatcctctttctgcccccggcctctgcctctggccagggtttccctggggctgccgaagccactttgggagcttccctttcaccctccttgctgggccaccagtgctttgtgttcgcagcgttatttgcagtggctttggggactcagcagtggcaagtccctgtgcataatgtgaacctgcagacttcaagatggggcccctcctgcacccactaacatgtctgcctttttttgtttttatcctggaacaagtggagaaatggcagagctggctgactctggggacccttccctttttcccatggcttcatttcttcctcaccacaactaattcggggagctgagaagtcacacagggtattcctctcccttctctgatgttattaattaatagaccagagaataaggttgcagatattacatttgttgtgtttttgtgttttgtttttttttttaaggaaaatcccaaacaaagcccagcatgatttgagaaaagaggatgttttcccagggaaaataatttttttaacctgcctgagaatgatttatttatttgttggaggccgttggtcagacagcctggagcttgggctgtggaagatttcaaaagcatagggctgtggtctctggaaacctattacagcctgcagctgtgagctgagccagtgacgaggtccctggaaactcaggaaggctgacaggtgggccttggggtattggtttgtggagaaggaagcattctttaggctgcggcactccttatagtttcccacccaccgagtgacattcaggcagaaattgagctcaggagacagccagccttcccacatcccacttcacttcccggtccacacgtaaagcagtgtgtctccaaggaggcagtgagcaattcccaaggtccccgtgttgtgagaagcgcgctgctttctccctttgcaggggaaaaaaaaggctttcctggtgagatcatgagtccttccggcttcatttctcattgtgggtttaacttctaaaacgcaaatggagtttagagaggatgagcagaaccacaggacctgcccccatctctcactcactgcaattgcttctactctgggcacaagtagggtgtctgaagaccatgtttccctctggttctctagtttgcagataacacagaagacactggctagaaccttaagctttctgccaaaaagatgcagagagcagggcagtagctactggcagtggggtgtgaataaagagtcctttcacaaccaagttcactgaggatttggagcaccagcttcccagcagtatcgaggggtggagaggtgtacattcaggtggaggggtacatctaggggtggagaggtgtacattctagaaacagctgttaacacactccactttaaagacagcaagctagacctgcaggatcaaagccacacactgtggtaggggttacaaatgtttatggggcccagaatactagcatagatgcgtgaaatggttggtgtgaggcaaaagggcatggtgggggcaaggatggggactgtggtcttactggcatgcacgtgacctacccagaatgagcagctgctactcagccccaacctgtcattgtttgtaaaaatgtaagcacagtgtagtggaatcttccaatttggaagggaagccggaaatccagatttaatggaaaaaatctgatttttcaacgtcgggttktttgtttgtttgtttttgttttttttaacagatagtgggcaaagaaaaattccactgttccacgtgtacactgccagcaacctctgctctctggagaggtggtttaaagtgagattatgcattgccctggtagaagaggaaaaaagccagcatcaggtcagggcaaaaataacagcccatgttgaactcggaatggggacctcttgctaagtcattccactcctcaagagaccattccacagaggggggatggatcattcagctctcctggtcccaagattgtgctgaagggaagaaggaatagaatctggagatctggactgctgccccttagatatgcagaggtccacatctgcctggggctacagcttgtgggactccatcaaaccaggccgaaatggcaaagacagtctaggaggaggaggaggtagggtgtgaaacagccaggctctctccaaatcccaagtgttgacacagccatcttgtcccatccctggaagcctctttggaaaccacatagagctgtgctggctcacgggatgtcctgtttgcttctgcctcagttaccttactttgcccatgggtctaccacaggcgctacctcattgtgtctgctgagaagtttacctgggaggggggaacaaagttgtccaaatctgcttgagctgaatgtatgatctatgcaaattctctctctcctctctctcttcctctctggctctcttagaagtttttttgttttgttttgttttgttttgtgtttaccttgcaaacaagatactgtataggaccctcttaagatggaggagggctttcttgcgccacctgtgtctacccctcacgttgtctttggctctggtcttaccaggygtatgcagggagaaagtgacctctcttccctctccacttggctgggaatattccaactgcctctgcctacagataccaccagaaagcgggttctgcaccttgtcatccccctccctaacrtcatctactccatccctcatgttcctccaacttgcttctcccatccctccttcaaaaacaaaacaaaacaaaacaaaagccttaggtttctcctttttgaaatgtggccttaacattatttttgggaagctgaccatccatcctttccctcccatctccaccaacatcagagaagacagcatcgtgaagcttctgtggcagcctcctaaggaaggggctgccaatctgtagttggcagatgctataggaattgcttacaaatgtcgtctttaagaaaaatgttcttatatttttcctatgggcaaaatgaaggcttgggtgctcatctaaagctcagccaactcctgaagcactctctcagagcatactgctgctgtaatgggctggcttaattatcggcagagtgcttgaaaaggctttgcagacctcccctgcccccaagactgggtgactttatatgtacttcattcaagggtaaatcaggagacgttctccatttatctcttcgtccttcctgcctggaaagtgatagcactaaatattcccagcagatgggtagtgttctcaaaggaatcaccctttccctaccttcagactctattctttacccttccattgctccagtgctgatggaggccaaagacaaccccagggttttcataggaaattcactggaattgtgcgcaattgtctttgtagtccttttgccttttttttttttaaatattatgttgtcaatagcatttgtttgggtatttgttttagaggcctcactctaagttattaccgtccccttcattgttttcaaagacatgtggtgatatagtttttaaaaataactattttgttatagatcataatatgcataaaactgtacagaaatattttgtaatgtgttgattttaaaaaaagaatctgtaaataaagttttaaaaaaagaattcaaatggcacacgctgaaatatgtagatattttgctag

SEQ ID NO: 94290 - DNA, 14411 bp, Homo sapiens
  misc_feature (1)...(14411): n = A,T,C or G
ttttggcttcttccaatgtccacgttcttaccaacacttgctagtgtccatctttttttttttttttttgagttggagtttcactcttgtcacccaggctggactgcaatggcacgatctcggctcactgcaacctccgcctcgcaggttcaagtgattctcctgcctcagtctctcgagtagctgggagtccaggcatacaccaccactcctggctaattttgtatttttagtagagatggggtttctccatgttggtcaggctggtctcaaactcccgacctcaggtgatccacctgcctcagcttcccaaagtgctgggattacaggtgtgagccaccacacccagacctgctagtatccatcttgtagattacagccatcctagtgggtgtgaagtggcattgcattttcattttgatttgcatttacctannnnnnnnnnnnnnnnnnnnnnnnnnnnnnnnnnnnnnnnnnnnnnnnnnnnnnnnnnnnnnnnnnnnnnnnnnnnnnnnnnnnnnnnnnnnnnnnnnnnnnnnnnnnnnnnnnnnnnnnnnnnnnnnnnnnnnnnnnnnnnnnnnnnnnnnnnnnnnnnnnnnnnnnnnnnnnnnnnnnnnnnnnnnnnnnnnnnnnnnnnnnnnnnnnnnnnnnnnnnnnnnnnnnnnnnnnnnnnnnnnnnnnnnnnnnnnnnnnnnnnnnnnnnnnnnnnnnnnnnnnnnnnnnnnnnnnnnnnnnnnnnnnnnnnnnnnnnnnnnnnnnnnnnnnnnnnnnnnnnnnnnnnnnnnnnnnnnnnnnnnnnnnnnnnnnnnnnnnnnnnnnnnnnnnnnnnnnnnnnnnnnnnnnnnnnnnnnnnnnnnnnnnnnnnnnnnnnnnnnnnnnnnnnnnnnnnnnnnnnnnnnnnnnnnnnnnnnnnnnnnnnnnnnnnnnnnnnnnnnnnnnnnnnnnnnnnnnnnnnnnnnnnnnnnnnnnnnnnnnnnnnnnnnnnnnnnnnnnnnnnnnnnnnnnnnnnnnnnnnnnnnnnnnnnnnnnnnnnnnnnnnnnnnnnnnnnnnnnnnnnnnnnnnnnnnnnnnnnnnnnnnnnnnnnnnnnnnnnnnnnnnnnnnnnnnnnnnnnnnnnnnnnnnnnnnnnnnnnnnnnnnnnnnnnnnnnnnnnnnnnnnnnnnnnnnnnnnnnnnnnnnnnnnnnnnnnnnnnnnnnnnnnnnnnnnnnnnnnnnnnnnnnnnnnnnnnnnnnnnnnnnnnnnnnnnnnnnnnnnnnnnnnnnnnnnnnnnnnnnnnnnnnnnnnnnnnnnnnnnnnnnnnnnnnnnnnnnnnnnnnnnnnnnnnnnnnnnnnnnnnnnnnnnnnnnnnnnnnnnnnnnnnnnnnnnnnnnnnnnnnnnnnnnnnnnnnnnnnnnnnnnnnnnnnnnnnnnnnnnnnnnnnnnnnnnnnnnnnnnnnnnnnnnnnnnnnnnnnnnnnnnnnnnnnnnnnnnnnnnnnnnnnnnnnnnnnnnnnnnnnnnnnnnnnnnnnnnnnnnnnnnnnnnnnnnnnnnnnnnnnnnnnnnnnnnnnnnnnnnnnnnnnnnnnnnnnnnnnnnnnnnnnnnnnnnnnnnnnnnnnnnnnnnnnnnnnnnnnnnnnnnnnnnnnnnnnnnnnnnnnnnnnnnnnnnnnnnnnnnnnnnnnnnnnnnnnnnnnnnnnnnnnnnnnnnnnnnnnnnnnnnnnnnnnnnnnnnnnnnnnnnnnnnnnnnnnnnnnnnnnnnnnnnnnnnnnnnnnnnnnnnnnnnnnnnnnnnnnnnnnnnnnnnnnnnnnnnnnnnnnnnnnnnnnnnnnnnnnnnnnnnnnnnnnnnnnnnnnnnnnnnnnnnnnnnnnnnnnnnnnnnnnnnnnnnnnnnnnnnnnnnnnnnnnnnnnnnnnnnnnnnnnnnnnnnnnnnnnnnnnnnnnnnnnnnnnnnnnnnnnnnnnnnnnnnnnnnnnnnnnnnnnnnnnnnnnnnnnnnnnnnnnnnnnnnnnnnnnnnnnnnnnnnnnnnnnnnnnnnnnnnnnnnnnnnnnnnnnnnnnnnnnnnnnnnnnnnnnnnnnnnnnnnnnnnnnnnnnnnnnnnnnnnnnnnnnnnnnnnnnnnnnnnnnnnnnnnnnnnnnnnnnnnnnnnnnnnnnnnnnnnnnnnnnnnnnnnnnnnnnnnnnnnnnnnnnnnnnnnnnnnnnnnnnnnnnnnnnnnnnnnnnnnnnnnnnnnnnnnnnnnnnnnnnnnnnnnnnnnnnnnnnnnnnnnnnnnnnnnnnnnnnnnnnnnnnnnnnnnnnnnnnnnnnnnnnnnnnnnnnnnnnnnnnnnnnnnnnnnnnnnnnnnnnnnnnnnnnnnnnnnnnnnnnnnnnnnnnnnnnnnnnnnnnnnnnnnnnnnnnnnnnnnnnnnnnnnnnnnnnnnnnnnnnnnnnnnnnnnnnnnnnnnnnnnnnnnnnnnnnnnnnnnnnnnnnnnnnnnnnnnnnnnnnnnnnnnnnnnnnnnnnnnnnnnnnnnnnnnnnnnnnnnnnnnnnnnnnnnnnnnnnnnnnnnnnnnnnnnnnnnnnnnnnnnnnnnnnnnnnnnnnnnnnnnnnnnnnnnnnnnnnnnnnnnnnnnnnnnnnnnnnnnnnnnnnnnnnnnnnnnnnnnnnnnnnnnnnnnnnnnnnnnnnnnnnnnnnnnnnnnnnnnnnnnnnnnnnnnnnnnnnnnnnnnnnnnnnnnnnnnnnnnnnnnnnnnnnnnnnnnnnnnnnnnnnnnnnnnnnnnnnnnnnnnnnnnnnnnnnnnnnnnnnnnnnnnnnnnnnnnnnnnnnnnnnnnnnnnnnnnnnnnnnnnnnnnnnnnnnnnnnnnnnnnnnnnnnnnnnnnnnnnnnnnnnnnnnnnnnnnnnnnnnnnnnnnnnnnnnnnnnnnnnnnnnnnnnnnnnnnnnnnnnnnnnnnnnnnnnnnnnnnnnnnnnnnnnnnnnnnnnnnnnnnnnnnnnnnnnnnnnnnnnnnnnnnnnnnnnnnnnnnnnnnnnnnnnnnnnnnnnnnnnnnnnnnnnnnnnnnnnnnnnnnnnnnnnnnnnnnnnnnnnnnnnnnnnnnnnnnnnnnnnnnnnnnnnnnnnnnnnnnnnnnnnnnnnnnnnnnnnnnnnnnnnnnnnnnnnnnnnnnnnnnnnnnnnnnnnnnnnnnnnnnnnnnnnnnnnnnnnnnnnnnnnnnnnnnnnnnnnnnnnnnnnnnnnnnnnnnnnnnnnnnnnnnnnnnnnnnnnnnnnnnnnnnnnnnnnnnnnnnnnnnnnnnnnnnnnnnnnnnnnnnnnnnnnnnnnnnnnnnnnnnnnnnnnnnnnnnnnnnnnnnnnnnnnnnnnnnnnnnnnnnnnnnnnnnnnnnnnnnnnnnnnnnnnnnnnnnnnnnnnnnnnnnnnnnnnnnnnnnnnnnnnnnnnnnnnnnnnnnnnnnnnnnnnnnnnnnnnnnnnnnnnnnnnnnnnnnnnnnnnnnnnnnnnnnnnnnnnnnnnnnnnnnnnnnnnnnnnnnnnnnnnnnnnnnnnnnnnnnnnnnnnnnnnnnnnnnnnnnnnnnnnnnnnnnnnnnnnnnnnnnnnnnnnnnnnnnnnnnnnnnnnnnnnnnnnnnnnnnnnnnnnnnnnnnnnnnnnnnnnnnnnnnnnnnnnnnnnnnnnnnnnnnnnnnnnnnnnnnnnnnnnnnnnnnnnnnnnnnnnnnnnnnnnnnnnnnnnnnnnnnnnnnnnnnnnnnnnnnnnnnnnnnnnnnnnnnnnnnnnnnnnnnnnnnnnnnnnnnnnnnnnnnnnnnnnnnnnnnnnnnnnnnnnnnnnnnnnnnnnnnnnnnnnnnnnnnnnnnnnnnnnnnnnnnnnnnnnnnnnnnnnnnnnnnnnnnnnnnnnnnnnnnnnnnnnnnnnnnnnnnnnnnnnnnnnnnnnnnnnnnnnnnnnnnnnnnnnnnnnnnnnnnnnnnnnnnnnnnnnnnnnnnnnnnnnnnnnnnnnnnnnnnnnnnnnnnnnnnnnnnnnnnnnnnnnnnnnnnnnnnnnnnnnnnnnnnnnnnnnnnnnnnnnnnnnnnnnnnnnnnnnnnnnnnnnnnnnnnnnnnnnnnnnnnnnnnnnnnnnnnnnnnnatcgtaagtgttagaaataatagtttcttttacagactaacttccttcaagcctccttgttttgtgctaataattcttttcttttctttttttattatactttaagttctagggtacatgtgcataatgtgcaggtttgttacagatgtatacatgtgccatggtgtgctgcacccattaactcgtcatttacattaggtatatctcctaatgctatccctcccctctcccccaccccacaacaggccccggtgtgtgatgttccccttcccgtgtccaagtgttctcattgttcaattcccacctatgagtgagaacatgtggtgtttggttttgctaataattctttaagctctatcttatgtagctgttaaacatgctcacaggcaggtagtacattctatgtccttgtaccttaaccaaaatatttgtgctggacgtgctcacaggcacgttccagctcacagcctgtgccccttccctatttggcataagcaacttcctcttttcctctgttctcccttgcctttatctatttagaaaagttttaaattattagccagtcgacttttagtttagattgtgccatctggctctagccaatggagacaggacacagtagcagggacaagctgtgtaagggataaaaatagcttctctcctttattcaggtgtgctctcaccatttttccatctgtgaggagcaccctctctgcagaaagtaaaattgacttgctgagagaactttttgtcggaatgctgatctttccttatggtaccagggaacaagcgttctgtttctaaataaacattttacatataacacagggtttctccatgttggtcaggctggtctcaaactcacgacctcaagtgatctggggcctcccaaagtgctgggattacaggcgtgagccaccgcacccagcctagtttttaaattttatttgcttttttttttttcttgagagggagtcttccgtctgtcatccaggctggagtgcagtggcacgatctctactcactgcaacctccgcctcccgggttcaagcgattctcctgcctcagcctcccagagtagctgggactacaggcgcgcgccaccacgcctggctaatttttgtattttcagtagagacaaggtttcaccatgctgaccaggatggtctccatcttttgacctcgtgatctgcccgccccaccctcccaaagtgctgggattacagcgtgagccaccgcgcccggcctttgcttactttttaaatattttaaaataaaaatattctcacataacaagatcatatttacttacttttttgagacgaggtctcgctcgatatcgcccaggctggagtgcagtggcgatctcggctcaccgcagtctccacctccggggctcaagcgatcctcccgcctcagcttcccaaagcgctaggacccaaggcgcgcatcacgcgtcgggccatgagtcaagggaatgaaggagaacagggtgctcagcctgggggcccagcctcccgctgtcacgcgctgcctgcggccgagacccctgcccgcaccctctgccgggctgccctccaagccgccctttctctggaggtcctcagcctgcaggggcaccctccacccggccatcgcgcagcctgggaaggtggagaaaaggagcgtcggggtctcggaggcggcgtgggaaacgccgggcggagcgtggcgctgtcacggcaacagagagacgcgacggggccccgccccaccgccagtttccacgacaacccgaagagcgtggggagtcaggcggtgccccggcccctgactgacgcgaccggggccagcgcgcttcgtccccgcccacccgacaggccccgcccccgagcccggccccgccccgcgctccccggctttcgcgaggttttgactactcgtggcgccccaggggccgacgggagtggcggccgcgcggaggaggccaagatggcggcagctgcggcttcgcttcgcggggtagtgttgggcccgcggggcgcggggctccccgggcgcgcgtgcccggggtcctgctgtgcagcgcgcggcccgggnnnnnnnnnnnnnnnnnnnnnnnnnnnnnnnnnnnnnnnnnnnnnnnnnnnnnnnnnncgggcgcgggcctggtcagcgcggaagcggtaccggccacccagcgtccccggtcccagctgcctgccgaccttgagcgtgtgggatcagggctgggcgcccacctctccgaacggcagagagcccgtccccagcgtgggggttggcgggacgggctagctgccgtggcggggctggggctttcccgaatggcgcgcccaggacggctcttgcggctggctgtccaaactgggcccgcgtcctgaagtgaccccagcctgatctcggccagctgcttgtgaccttggcctgtcccagcacccttggtcacttcggtctgatccccggctcaggatccaggaacaccctctcctgagagcgaatcacggtctaggggtcagcggcggagagggatggggtgggtagtgggacagggtgtgcgtctggtgccctgcaggaggaggccattgctgggtggagaggtgggcgctgagagtcagatccccaggtagggctgggtggtgtcctggcaggcgctgagcggagatcttgcaggcagtggccttgtcgtcgaagtctggcctttcccgaggccggaaagtgatgctgtcagcgctgggcatgctggcggcagggggtgcggggctggccgtggctctgcattcggctgtgagtgccagtgacctggagctgcacccccccagctatccgtggtctcaccgtggcctcctctcttccttggaccacaccaggtgtgcagctggctggctggctggcagcgggaggttctgggtggagctggtaaggtggaatcttcagctttcctaaccctttccctccctccagcatccggaggggtttccaggtatataagcaggtgtgcgcctcctgccacagcatggacttcgtggcctaccgccacctggtgggcgtgtgctacacggaggatgaagctaaggagctggctgcggaggtgtggggtctggggatgcctgggacccagggctcagggctcccactgttgagatggcagggttgtgatgaggctctcggtggcaggtggaggttcaagacggccccaatgaagatggggagatgttcatgcggccagggaagctgttcgactatttcccaaaaccataccccaacagtgaggctgctcgagctgccaacaacggagcattgccccctgacctcagctacatcgtgcgagctaggtacacgggctgcccatggggtggtgctggagagatgggggaagggctgacttgtgcttggaactaaggagccatggatctggtcctaggcatggtggtgaggactacgtcttctccctgctcacgggctactgcgagccacccaccggggtgtcactgcgggaaggtctctacttcaacccctactttcctggccaggccattgccatggcccctcccatctacacagatgtcttagagtttgacgatggtaagaggcctccagtctcctacccccagggatgctttccctgtgttcctgggtccaggaggtcctgcccacttcttgtctggggcgtcttctgtgcatgtctcaggaggcttttgggctccttcagttttgcgtatgtccggtggagggtactgcccctttgatgccttgggtaggggcartgtctgcttcacagagggggggcatgatcccaggttggacatgagcctgagaayagccctcactgcttgtcgttggccaggcaccccagctaccatgtcccagatagccaaggatgtgtgcaccttcctgcgctgggcatytgagccagagcacgaccatcgaaaacgcatggggctcaaggtaaaagggttgggaggccatggtgggtatcagagaagggctgggagctgggcagggctcctccccactcccttctctgagccttccttgtctgcagatgttgatgatgatggctctgctggtgcccctggtctacaccataaagcggcacaagtggtcagtcctgaagagtcggaagctggcatatcggccgcccaagtgaccctgtccagtgtctgcttgccatcctgccagaacaggccctcaagcccaagagccatcccaggcctgttcaggcctcagctaagcctctcttcatytggaagaagaggcaagggggcaggagaccaggctctagctytgggccctccttcagcccccatcatgggaataaattaattttctcaatgtacatatttgagttattatatggaaggagtgcaggtttgcaaggaactctgataccaagacccttgccttcacaaggctcccaggatgtcccatgcagtgtggccagcaatgccctgcactgactggtagctgggagtccagacagtgggtgtgggacagaaagcggagaactgcatgttagaggaagtcagcatttggtggggtggggtgtgtctgagcacagagctgaaaagggcctagccaggcaggatgtggcccagggacctgttggaatgaacagccaagtgttaaggtgttgaaccacttggcccccattctgatggcagcagggaaccttggctgcattttaacaggggaaaggcctggtctagggcaggggctatttattgctgggctgggctgaggaaggggatggctcccagccaggtgaaggagtcaagtagacagacaggatgtgtgtcatggagtggcccctcctagcagtccacagggtagctaggtggtgggtcctggccagaagctggcagtagctgggttcccacaggagcatgctgctgagggagggagacagtggatgctatctaggagggtcacagagacatgacccagcaccggcccagtgacctggtgcaggactcagctcctgagcttccctcgtccctaggaagggaaggaaaacacccattttcattgctggtgtcctagctgcaggagctgaggggagtggtggccatagtccaaggaaggcaagagctgaatgggagaaaggtggtaccaataggcctgcaggcaagagaggtgcaggcctgggggaccagggtggacagtaggagacaaggtcagtggtgggggctgcagctcagtatgtggcacaccccagcagcctcagcccagtggtgagcagctgggtggggggctctgtaggcctctggggtctgggaagagatccccatgccatgctttcctgaccactgaggctcagggtccgggcccattcttcagtaacaccggggtctggctggggagccccgcctgctgatgagggcctgtctccctgtatcgctggctaggatggggcaggtctgcagagacaccatgaaagggatgcttgctggctcttaagggtctttaatggtttcattttgtggcccttccccccaaccctggtgactgtcccagcaagcagtcagtagaggtccccggagttcagtgggggcctggagatgtcggacttgtgagggaagggccactctccccttgtaacctgtgggggaggagctgggtcattcctgtggattctgccctgccccccacctcccctgcctgtgccacctctggtacctctggtggctgctaggtggaagctgcagcaagggggtcccaagtgcagggcctctgggtgctacacatctcacagccagggcggtctggggcattgatgaaggtgcaggaaggacaggaccagctgggctgggggaagagagacagttgttgcttccctgctctttccaatgcccatggctgtcctggccctccctgcccagtcccgtgcccacctggagtggactgggcaggctggaggcagctggctgggggcctgggggtagccccaatgatgggggaaacaagcgtccaagttccccgtccatcttctgggggtgctgagggctaggtcctgtggctgagggggtggagctcaggactgtggggctgcaccccacctcccacaccccacccccatcgaggactgacctggggcttctcgaggagctgacagcaagtagaggaaagcagrgtccccatcctgccgaaccccgtaagaggcaaggstgcgctcaggcacacacaggcaccgtccgatgacccagcgttgcacggctggcgggaaaccgagctctgagaacacctgtggccagagcatcagggcaggtgatgtcacctaggctcctctgcccctggcagggctccccagaccctgtgcccacctgctcctggagagctgcaacagtgcagtgggggtggacctgcagggcaacgtgtgcagaggacgcggcggatgcggcagaggcagcgtcttcaagtgtgacctgcagcctgtgccagaatgtgggttcagggatggatgggggacctgggatggtcacgaggacaaggtgaagaagcagccccaggcctcacctgatggggccaggtgggaagcaggcctcctgaagctgaacactcagggccacacgatgctgggccaggacggctgccacttgggctgcccccttctcgtctccacctgcaatagcccgggccaggctccctgccagctcttctgcagggtaaggaaaggacagctgtcaccactggggactatctgctatccccgaaccccccaaccccctccccccacctgtacctctctccgtcaagtttccagggctcctaggaagatctgcctcaggtggagggcccttgagtgtggaggcttccgggggactgggcagggagacagggcatgcttctgggcccaaggctggtggtgagttgctcttgctgcctagaggtaagatatgggtgtgctgtgctgtggcctctgtccaggcctctaggcccttggttttccaggacctttgccttctccctcacctcagtccatgccagggccctgcctcaggccacacttctagccacaccttctcccagccttggctctggcaagaccctcagaggcccctgccagacttctgttagtgctggagctgcacttagttcatatttgggaattagagccttttcaaacccttttgtgcctggctaggccacctctcttggctctttctgccagccagggatgcctcacagcagaaccaaagcaggccctcagtggccctgcagtcagggtggcctcttggagcccttggggacctcccctctccgggctccctgacccacacctgggctgccagcactccagacaagccactgccctgggtgtcttcagagctgagcaccctgctgactcaccttcttacccgccctgtgaggcccagcccactgcaatgggggggtccccatccagtgctgacacagctcccgtggtctcaggcccactatattctaccatctccctactaggataagcagggccttccacgcacccagcgctgttcctggccccggccccggccccggcccccactgaacctcaaggatcacttatacatgctcacctcagggtttgtttgctgcttccttggtcacatggttcatgccatgaccttcaaatttcactccagtgtcacctcaatgaggccttccctgccaccactttttttttttttttgagacggagtttcactcgttgcccaggctggagtgcagtggtgtgatctcggctcaccgcaacctccgcctcctgggttcaggcgattctcctgcctcagcctcctgagtagctgggatcacaggcatgcaccaccacgcccggctaattttgtatttttagtagagacgggatttctccatgttggtcagactggtcttgaactcccgacctcaggtgatctgcccacctcggcctcccaaagtgctgggatgacaggcgtgagccaccgcgcccggcccctgccaccgttttaaacagcaatcctcccagctccaccattctcattcccacaccatctaacagactttcttttttaaaaaactctacagtaattttattatttttgtttttttttttggagacaggatctcgctctgtcacccaggctggagtgcagtggcacgatcacagctcactgcagcctagaacccctgggctcaagtgatcctcccatctcaacctcccgaatagctgggattacaggcagacacgactacactcagctaattttttttttttttttttttttgtgagatggagtctcgctctgttgcccaggctggagtgcagtggtgcaatctcggctcactgcaagctccacctcctgggttcacgcccttctcctgcctcagcctcccgagtagctgggactataggtccccaccaccacacccagctaatttttttttttttttttttttttagtagagtcagggtttcaccgtgttagccaggatggtctcgatctcttaacctcatgatctgcccacatcggcctcccaaagtgctgtgattacaggtgtgagccaccgtgcccggcccactcagctaatttttaaattttttgtatgttgcccagccctgtacttattttatatgtctgcctcctcccctctaaaaatgcaagctccaataggatggggatgggaggttttgttcatgccaaaggagtacctgggacagggcagctgctgaatacatatgcttggtgaatgactaaagagagcttagctccttttataaaccctgagttgcttgagtctctcttacatcactgtctggctgtcttcctacccctctggcagctctgcttatctcgtttgtgggctgccctctatctgggagccccatactacctagtccttcatgtttctcagtctcaactgctaactcttccatttaagcagccatgtgagccaggggcagtggctcatgccaataacagctacttaggctgaagcaggaggatcaccgtagaccaggagttcaaggctccagtgagttagggtcacgctactgcactccagtctgggtgagagagggagtctttgtctgcaaaaaacctcccaagcagccatgaaactcagctaattccatcttctttttttttttttttttgagatggagtcttgctctgtcacccaggctggagtgcagtggcaagatctcagctcactgcaacctctgcctccgggttcaagtgattctcctgcctcagcctccccaagtagctgggactacaggcacacgccaccacgcctggctaatttttgtatttttagtagagacagggtttcaccttgctgaccaggctggtctcgaactcctgacatcaggtgatcacccacctcggcctcccaaagtgctggaattacaggcgtgagccaccccacccggccactaattccatcttctaagcatctctagaaacatccttctccccaaccctatctgcaccaacccttgccactgcagaactctgtcttaagcaggaggtatctgagtctgtcactctcccactcctgtcactctcctgctgctcttgggatgatgtcttctcacacaggtcctgaccctgcctgctctgcctcttcatgcttgcctctcatccttcctgagggttaaggaagtgcaggctgaggttccagggcttcctggtggaggctgcaacttgtgctggctggggcctcagatggtgtaggagactgactccagcagccactccaagtactccaagctactccaggctccacctactccctcctggaagccttcccagacatccagcagtggggaaggtggatccaacttccccaaccaggactggggggccaaggctattccaaattgtaattgtatccattacagggcactgaccattctgtccttccacggtggcacctcggactaggactgcccaccgctgagcttcctgagggttgaggaagtgcaggctgagggttccaggccctcctggtggaggctgtagctcgtgctgggtggggcctcggatggtgtaggaaactgactccaggggccactccaaattaacctgagaagagggagagtccaggctcagggcgtccccccgccctacatcgcacgaggagcaaagaaatacaaggtaacatttatagaccatttacacggtcctaagccctgtacgcctatcatcaaatcctcacaatagccctgtaaagtaggtccaggtaggtcccagtaggtccgagcgtcacccccatttcacggacgagaaaacagaagcaaagaaacataactgcttaagggcacccaggtggcaagcggaggggcctaactttgggctccgtgccctgcccgggccaagaggac

SEQ ID NO: 94291 - DNA, 149133 bp, Homo sapiens
ggcagagatgtgcctagtttctaaagtcactcccctgtgactaggtaactgaacacagaacaatttgactactactgcccactcctctagagtcccatttaaaaggcaacacctgatagcagccagtgctaattggtgatggaaatggaatgggttactccctcgactcccacaacacttactgcctgatttgtttccacatggattcaactgggcacgcaataagacttgcctctaagctttctgcacagtctgagggaaagatttcaagtgtggtgcaggtgttaaactccagtcatattgtgtatttttactaatgatttcaagaattggggatcttttggatacaatttgggtagagtcctaaggccatctacagtaataaaagcaaaaccaattagtaggttgtttaattcatttagaggctatctgcatgctagcagttttcctctgctaaatcctgttaagatgcagtgggttctgccaggcacggtggctcacgcctgtaatcccagcactttgggaggccgaggagggtggatcacgaggtcaggagatcgagaccatcctggctaacacggtgaaaccccatctctactaaaaatacaaaaaattagccggccgcggtggcgggtgcctgtagtcccagctacttgaggggctgaggcaggaggatggcgtgaacccgggaggcggggcttgcagtgagccgagatctcgccactgcactccagcctgggtgaaagagcgagactccatctcaaaaaaaaaaaaaaaaaaagaaaaaaaagcagtgggttctattttgtgcagacggagtaggctgccatgacaactgtctgtgaatattatttcaatattagtcatacatttctagcgtctgcttctgggctcagcgttcttctaaagcctggatacaaatttattcttaatggacctctcctggacgtgtttacaaaaagaacaaaaacaaaacactttcaactggctgactttttttttctttcagaagagaaatttgaatgaattcacacaactgaaaattgattgtgaatcttattgtcattttttcttttaaaaaggtgattgtgatgtgaacttatatggtgctggattatagattttactgaatagaagcactacaccaggatttggaaagttcccctgtaggcatgtagtccttacagtaaaattattatttttttcttctaacagtatcagaaagaatcttgtagttgcctgtggcagaagatccgacccaaactgagcaaaaccagtttcaaacgaatctggtttgaaacttccgaaggtaagatttgatccagagactaaggatggagggctccggctccatttccctgccttttggttggcccttccccatgtatcaatttcaccccctggactggctcttctcatggtgaaaccttgctcagagcaccacactagggggagataagtgagtctgtcccagcactctctccaggtaccctgagattcactcataatatctttctttagctatacgcccaccccaaacactcctttttgccaggagaagaggatatgctgtcttaggcctgaattatgtgcttgttcctgaaaagttgctgttgcttggggagtgggctcggataattggcttaagtcaaccagggcccgcgcttagagttgggggctgcgtcagtcccatgcaaatcacttggctaaaaaacaggaagcgggggtgatttcgaaaaggaaaattgtgattctattacaaggaagttaggggactatttgctagccacctggttagggaacagaatgctggcctaatgataataataatagctaacatttattgaatactatgagccaggcaccaagctgctttatagttgtattggttagagaatgtgtttggctgcctgaaataaggtaaatagaacaccaggggcttaacacagagcgcttggttttcgtcccacatgatacgaagccaggagatatacagtgtcacattgtcatccaggtctcaagctcgtccctccatcctgcatccatcctgcatcatggtttcgctattctcagtgtgaggctttcttcctagtgtgcatgagatggctgctcctcctccaggcattgtgtcctggttccaggcagaatagggggaaggacaaaagagaagaggcttatgccagctgagtcttttcctttttatcaggaaaatagcttttctggaagcctcagcccatagatttctgcttgtatctcaagggctagaactgtgtcacatgactacccatagttgcaagggagcctagcaaatcaagttttgttgcccgaacactgccacctagaacaaaacgggggttttattagtaaggaacagggggagaatggacagtaatgatcagtggctgctacaatgtgtgttaacccattcattcgttacgtcaacccagtgtgattggtgctatctgtagcctcgttttatagttgaagcaataggcacagagaggttatgtaatttgcccaagctcacacagagctgttaagtggttgagcaagaacttgaacccaagcaagctgactctagaatctaattctattatgtccctagacacatcctgacccactggccagaccacatttcttctctaggatgtatatccacttgggaaatgcaggcctctcctggaaatggtagctaatacttgtttagcactttatagtttacaaagagattgccacttaaattattctctttaaatattcttctttttttttttttttttttttgagacagagtctcactctgttgcccaggctggagtgcagtggcacgatctcagctcactgcaacctccacctcccaggttcaagtgattctcgtgcctcagcctccggagtagccgggactataggcgcacaccaccatgcctggctaatttttgtatttttagtagagacggggctttaccatgttgtccaggctggtctcgaacttcagacctcaagtgatccacctgccttggcctcccaaagagctgggattacaggtgtgagctacagcgcccggcctattctcatttttaaaatgaggaaactgaggtttagaggagttatgtaagttgcctaagatccccaggttgaaagtggcagagctgatatttcctcaaaattataaaaacttactccagtttccctttcttaatcttcctgttcttctctgcacagaggagttcatttctagtttttttaaatggcaatatttcactttaggccctatattaacttcataaccttctcacgaaaaccaaaccagagaaatcttggctctctcgcctacttgttttcacataggccaccaggaggaatgtgccacatcagtgggaactgtgacagaagtaagtaatggaggcctggaaagggaggtggtttttctctcacatcatataaaatccagagcttccgtcagaaaatgaaagtgttagttacaaatagctcttattgacctgttaaagagttattaaacatgtagacattgcttctcattagttacatcagattaatttgttacttttctttaaaactatttcataaattgaacttgtcactgagtaagaattgacagcccacttcactgggataaattagagaagtttcactacattactgacacgtcagtttgcttatgattattatttctctcgttctttccaagtctttgaaatctttagcttttggcattgctttatttacatatcacaacattcttttgttttggtcttactactgagtaaaccataaaaattaattgtagaattaatacattttagggagacatgagaattcaatcaaatacatttaagaaatacattggttcagttcagaaaggcaggacaactcgaagcaagggggaggaggggcgtggcttccgggttataggtagattgaaaaatgttctagttgacagttggttgagtttatccaaagacctgggatcagtagaaaggagatgtctgggttaagggactgtggagaccaaagttcttattgtgcagatagatgaagccttcaggtagcaggcttcagagaggacagattgtaaatgtttcttatccgtcctaaggtctgtgtttatattaataccggagaggtataatgaggcatgttggacctctgcttctcgtcatggcctgaagcagtctttcaggttaaattttaaagtgccctggcctaggaagaagtccattccaatggttgggcggggattaaaatttttcttttggtttacactccaaaagctatgaatgaggccaggtgtggtggctcacgcctgtaattccagtgctttgggagcccaagaatttgagaccagcctgggcaagatggtgaaacgccatctctgtaaaaaataaaaaattagccgagtgtggtggcgggcacctgtagtcccagctacttgggaggttgagtgaggaggatgacttgagcccgggaggtggaggctacagtgagctatgatcgcgccactgcactccagcctgggcgcgatcatagctcactctcgacagagtgagaccctgtctcaaacaaataaaaataaataaataaaaagagtactgtgttatagagcagtgcccctcaaagtatgcttcactgtcacctgggagcttattagaaatgcagcttcacagccccaccccagacctactaaatcagattgggattcagcagtgattgggcccgggaatctgtgttttgacaagatccctaggtgacttgtaagtgcattaaagtttgagaagtgctgttttagagttttacgcaaatgagttgtaagactgacagattgtgcaccctttaaattttggtgaaaataagagcttcggctttagtaaattagacctatattgaatcctggattctcctttgaaagtctcccaatcctagtctccagttagctactccgggtcacgagccttagctcaactgtatgcttgactccatcccccatcaacaccttcacctaattaatccacattcaaccttccactgtcaggtcaaagatgacttcctcagagaaggctttgctcgaccccccacctcactctcataaaatgaatacttgtcctttgcaatttcacatttatgattatttgattcatgtttacttctcctactagcctataagctttaggagggaagagaccttaccagttttgctaactggtatatccccagggtgtagaacagtacccggcacataatagatgctcaacaaatatttatttaatgaatatatgaatgaaaccaagccaggaataagtgcacaaaagaaaatgctctgaaaatgttttccaaaggcttctccgtgaactcttaggcatctgaggcagtaatagtgagggttttgaaaagaaagccctggatattttctaggacttgttttttttttttttttttttggcggggggcaggcgtggaacagagtcttactctgtcacccaggctggagtgcagtggcactgtctcagctcactgcaacctccacctcccgagttcaagtgattttcctgcctcagcctcctgagtagctgggattacaggtgcccgccaccatgcccagctaatttttgtttttagtagagacagggtttcaccatgttggccaggctggtcttgaacttctgacctcaggtgatctacccgccttggcctcccaaagtgctgggattacaggcatgagccatcgtgcctggcccaggccttgttttatcaacattcctccaagaaacaaacttttctttgtttaccatgttcatgaacacaaaaatagttgataaggaggcaatggtgacaaaaagaaagctggaatctgcctttcaataagcaagaaatagtcctctcatccaggtcatgtcgtccacattccattggcaggtattgtcatatctgcatcctacattgtgaggtcaccaaggcaacctattaatcattctagaatctacctcttgaagattacaaatgagactgggaaaccctcttcaataagacctgtgtgatgatagattgtgtcctgagcccgcaggtcaggctgaaagagtcaacaaccagcaaagtgaagatctaggagtctgttccccttgaacctgtgtggacctgatcaaacctcgagggaaaggtaagagaagagcacttagtggaccaggtgaatggagtatgatccgggtaggcatgggacaatgatcgaaagttaacctgtggcctctgtctgtttagttgtttagcccaactcttgtggtctttatgttttatgtatgaagtttgttaaaagctttaatatatatgtatagrgtgaaactgggtcaccttgatgtgctggtcactgagtcacaggactgtgactttggggaggccacctaacttctctgggcgtggtttcctctcctataaaatgaagatgtctgaggacctttctagacaagtccgaaggatcagagtatcttaccacatttcagcctcacctgttacagagctctgggcagagaacctcatgatggtcttgcaaggtgactccattctctgtctagatcagttttgcccaattcccagtgctttaacatgagagggagttgcatcagtgtgtagtctttgttttacttttgttcttggaatggcagattgtagctcctgtagaaggaaaagaagaagaaataaggaattagcattgctctacattgactcatgctagatgtcaatctgagatacatgtaaaacgtaagcacatacaagataaagaaacagattgtggcaatatttaaaaatatcctagctttctaaattagaagcagttctgataagcctatttggaattcatgcaaaacatccataactctgacagtctgaattgtacatggcaaaggtaaattgcttccaggcagtaattctaggtgcaggtttagatggactatacggtaatcaagtctccattgctttacagatagccctcactccttggcctcttactttccagattgcttctttgttagcctccctgttggctccttcctcttttcattctctttaatgtctctattccccagtgttctgcttttgcctctatagctttactctataagctctccctggctattttatcttctctaatcacttcagctattgtcagcaacctgatgacctatttaatctgactctctggtcctgatttatttcctgagctccaaacccaggcttctcctgcctgtgggatatttcaacagtgaggtctcacaagtactgaaatttagcacactgctgactgaactcacgatttttctccaccataaactcgcttgtcccccttcatgtccgactcttgtaccctttaataccctattgcaatgaatatcatcatctcttagactgtaaattataagaaggcagaaaccatgtctatcttgtccaccccttgtaaccacagcacctagcatagtgcctggcacatggtagacacccagtaaatattgtcaagtgaatgatgaatctatttattcttccaaactaaaaaccctggaatcctcctcgatgtctctgtctccctcactctccatgcccagtctgagacctgtggggtttgttacataaaacccttttacatttggctccttcttccccttcatccccgctgccatgactttaattcagcccttaccatctatctcctggattattgcaggagcctcctcattggtcttcctgttacctgcttttccccattcatcaccatctgatccccagagtgatcttgcagcttgaatctaatcagcttaccctcaggctccccttgacttaaacagagtttgcaatctggcagctttaagcggaatccacgcagtctgtacggcattttgagaaaatgagaatgactgtattttgttgattctaagatgcatttttttttcacattttagcagctctgatattgggatgtgtcttgaaatggacagtgacatagtttgatcagtggtgttctctcttattggtacataaaacagcagtgtaccctgtaatcagtggcttcataaatttgctgaaaaatactcatgctaacatttaaaaataaggagatcgtacataaaactatcttcagcttctcttggaaaattacatcaggcaacactgggctgcgatttctggatagcagccgaagatggagctaccagtaagtagcagctacctcatttagacaaaaactcgctacagtgtctcatggtttccacccaggctgctttagtcatttgtattatctgccccagcccattaagcatttgaaaggacaatccctgactgataagttgaagtccagattctttgttgtgatttataagaacacaggtggcaccaacctacctcccccaggttaatgctcccaacctttgctgtgtactctatgtatcccctaatctcaaatataacagactcccatgttccctggaatgtctttctctatcttttatgccctacgaaacatttcctggtgttcccaggtcgagctcatttctttctggactccagtagtaagtatgtgggcgtatctctgcaaaaaccgcagttacttttgcactaacctaaagtacagttctgtgatttattttttatttttattttttcgagacggagtttttctcttgttgcccaggctggagtgtaatggcgcaaccttggctcaccgcaacctccgcctcccgggttcaagggattctcctgccttagcctcccaagtagctgggattacaggtgcctgccaccacgcctggctaattttttgtgtttttagtagagacacgttttcaccgttttggtcaggctgctcttgaactcctgacctcaggtgatccacccgcttcggcctcccaaagtgctgagatggcaggcgtgagccaccacgcccagccagttctgtgaattttaacacatggatagattagcataaccaccatcatcatcaggatatagaacatgccccccaaaactccctcctgctagccctttgtagtcactcccctccctcacccataaacccctggtaaccactgatcagttccctgtcactatagttttgtctttttgagaatgcgatataactgtctgtatccctttcagcatggcctcttccactcagcataatgcctttgagacccatccaggttgtgtgtatcagcttcatttgtttttattgctaagtagcatttcattgtatggatgtcccacagtttgtgggacactcacggaaggacatttaagctgttttcaatgtttgaccgtatgaacctgcatacacgtttttgcatgaatagaaaattttatttctctaggatagctacccaggagtaggattgctgtcgtatggtaagtatatgttcaactttataagaaagtaccaaactctttttcagagtgactgtaccactttgcattcctgccagcaaagtgttagagttcgagttgctccatattctagccagcactggatattgtattaaaaaaaaaaattttagctgggcacagtggctcacgcctataatacaaatactttgggaggctgaggcaggcggatacctagagaccagtctgaacaacgtggcaaaacccactccctacaaaaaatacaaaaattagccgggcatggtggcatgtacytgtgatcccaactacttgggaggctgaggtggaaggatagcttgagcccagaaagttgaagttgcagtgagctgtgattgtgtcactgtgctccagcctggtgacagagtgagaccctgtctcaacccccccacccaaatttagccatattcatagacatatagtggtatctcatggttttaattttaatttctgcttccttgaatctggcctggaggaactggagggaacaaaaggtaaactcactgtcagttcagtggtacttcaaactctgatctgtttccttcatctgccrtctgttatttacttttcagagtcctcatgttacttgtttattgctgtgggacagattaccaaaaaatctagtggcttaaaacaacacatgtttatgatcttacagtttctgtggggcagaaacccaggcgtggcttacctgggccctctacgtcagcatctgtcgtgagctgctgcacacaatgtgttgactgggctgctgtcatctgaaggtttgactggggagggatccacttccaagcccgtatggttgttgacaagagtcagttcctcatggtctgtttgactgagggccttagttccttgctggcttttggctagagacttcccccagtcctttgccacttgggcttctcccacatggcagcttacttcattgaaagcacaaaagctgtgaagataatagggtctgctagcaagacagaaaatcacagtcttttataacctagtcatagaagtgacatcccaataccattgccatgctcaattgattagaagcaagtttctgggtccagcctatgctgaagagaagggatgaacacagtggtgtgaattgaccaggaggaagggatcattgggggcagcttagagtctgtctgccacagtcctcaaatagctgtttcatggattctgtccaggttttatagctttgtcccatgagagagaaagagtagagtgggtaaaatgtccyttttccatcttacccagaccagaaccttctgtgaagctttttgatttgatttatgaacattcagggttaatttaaggaatttctttaaactcaagccatcgaggaccaagctagggttagattaagcagtggtccgaattaaaattctgatatctattaatctatttattaaatcacaaccaaggaaagctcaacttttgtatctaagatggagcctttcgaaagctgaatttccccaccttaaaacgtgatggctgttttagcctgtcattgtggctgctcaccaggtgaccccaatagaaacatctggcaagcactgacttttatgaatttcttccatctgatagtgactcataacccacttttaatttcttttaatgacttcctaatgacttgccagatctggcctctcttttctcctagttaatgtgatttttcagtacccagaattcacccttgaaaatatgcttgatcctttctctatttaagtgaaaaattacttggtattcctttcttctcttcacaagggagcaggatctttaaattagagtccttcgattttttttttcttttgagacaaggtcttcctctgttgcctaggctggagtatagtggctctatcatggcttactgcagcctcgatcttgcaggctcaagtgatcctcctgcctcagcctcccaagtagctgtgagaacaggcatgtcccaccacacccagctaatttttttttttttttttagtagagaggtcttgctatgttgcccaggctggtctccagctcatcagctcaagcaatcctccttgctcagcctcccaaagtgctgggattacaggtatgagccactgcccccagcctttttgaacttttttcatcatggacccctcacagtaagtttcgtgagaatggaccaagcatatttatttatttacagctaatactgctgaactcatttattgtgtacatgatcaaatatacatggaaatagaaaagttaacaagaataagaaaatagataaaaatatgagttctgatgttttgctttctgctctccagcagatctctgtgcatgtgctgtggggaagctaccccagttttggagactactaggggttaggaagtggtgattgggtgtgattgcttgccagtggccccagcatcaggaggctagctcagagtcagaagagctgggaggccagccctgtctgagcttcccccctttggtgctacggggcttcgaggtatcaggagccacaagcagacaccttaagtacccaccatcaaatagatctgcacatgccgctgttttcttagtctcctctccagtccagctgcttcacctcaattctagcatactcctcagggtatgtcatgatcaataatgggagctgcccattagaactactttgccttggcagaaattggaactgtggccagctccaggaagcttgtgaaataggagaggcttgcctacaaatccctctctcccttgagaggtagccaggcttctccattcccctctgtctttccatagtttgctattgccatggactaactaaatgtcctgggttgggatccctcagaagcagagcctgagataaacatttgagagcaagtttatttggaaggcaggagcaaagaaagtacagcagtggggaagtgagaaaggaagggaaggcaatcaagagagattaagtccagcctgaagaggtggagagggcagccatttttcaatcttaacatccgggcacctttatgtaattgcagcattatcattaggaaagaagttcattttgatttctagttcccctctcccatttcacaccctagttaagtactgtagaatatgcatagctatgagaaccccctcttcccacctcttttcctctggctgatgcctagtcagtcatcaggtctcggcccgtgcatcacttctaggaagccttccgtcatccccctttctgagatagggctctttctctgcgcccctggagtgtctcgtacctgttttattagatattttatcataccatattgctttcatttattcatgtaatagatatttattatgtgcctggcactgttttaagaacctagtatgtatatttcaatatccaatcatgtgtatttttttttctctgccatttgtgtctctgtccctcagtagcacctgctacataggaggtgcttgccacataggaggtttaaaactgttaacatcactctgcccatcattttttcttttttcaggctgggagaacacatccctggtcagctgtaggaaagccagagagcatttgagaagaggctgaagcttgaattttgcaaacacacaaggtgctgactgaggcagtagagtgtaatgattataataagcaggggttctagagccaaagtgcccgggttcaactcccagttccacccctcatttgctgtttgactttaggccacaattcctaatgggtgaagagggatcgtaatagtatatacctcagaggatggtgtgtggattaaataagattaacatatgtaaaatttaaaagtacctagaacatggtcagtgctcaatagatattatcattattgtgatttattcacttacatcagtgttggttcatttaacagttggaggctgaccataagacccctttggtgctcacagtaacatttcagtgttctttctacaatggaaaaatacaatgaagttattcattcaaagcaaattctgagttttcaacaaatcacataaagggcacagccaatccaattcgtggtccaggagctggccattaaaataacaacctaaatcatgagttttttttccctgctttcctttctttctgtggttaaacaaatatttggtgagtacctcttttgcattcagtaatgagtaggtttaaaactgagggtgtggccagtcgcagtggctcacacctgtaatcccagcactttgggaggccaaggcagatcacctgaggctaggagtttgacactagcatggccaacatggtgaaacctcgtctgtactaaaaatacaaaaattagctgggtgtggtggtgtacacctgtaatcccagctcctcgggaggctgaggcaggagaatcgcttaagcctggcaggcagaggttgcagtgagcccagaatgcaccactacacagcctgggtgacagagtgagactctgtcttaaaaataagaaaacacacacacaactggggatgccaagaggaatgaaacagatcctttccctttaggatttcacatgtaaaagggcaaattacagcacactttgagcagctctataattggacgcacacatggctttgagagccagaagacagagtgactaattcccctttggtgattcaggaaaggcttcacacagaggaggtgacattggaacaactgtatctagacatagccataatttaatggctgaggattgaataggcatttggttgggagagccagctgtatagctacattgtccrctattttttttggagcctgagtaattatgctatcatttacaatttgtgtagcagcctcatcaggtcctactcttggcgtccccaccatggaaacctgagtggtcgtattgcctcataatgaggccctctggtgatgttaatatactaataggacagaagcccagagccaccttgccagttatttttcaagtaactccatccgattaaatggcaaactaggtaaccactttactagatctcccgtggctctcaattgcagaaaggwatcgagctaaagagcagcttgggtggggttatgaaatgtttatggctggagtcctgtaaattttagctggcaaagcctaagaccagtaagcttgaaaacacgtatgctgtgtcaccagctaggaagagtttgccagggaaactgctggcagcgcggccgcgatcagtataagactctgtgaacaagaagaccaccactagattgcctcgaacatagcagaactgtggctgctggcatccattactgccatgggcactttgaattttcaagtatgtctttctcctcccctaaactcagcaagattacaggccaactttcctttccctttctgctgatgaagggaggtcattctcccttcacaggtaggttctccaataaggagctactgaacagctggtggagtataaatgtcttatgacccagtggctgctccctcaaacccayacctttctagaaccaaggaaaaatgtttagtttttccacttctcttaattgtaccaggttaatgtaacgttttctaaaaattatcctcagtttacctaaagagtgcttttctgctcttatttactgaaattctcttttctattttgtattgatggcagattatgcacacaatagcgtggtcctgcccatgcggagcctggtccctttggaagcagtcacgtggccgctgactttgcagcccattacttgagtgcatctccaggccaggaacagagcagggctggggcagagagctgtgctcacggccagtgcattgtctcccagattcgtggctctgggcttgccttcccggctgaaaggcaaagcagcctggccctgttctagttatttctttgtgtatatatgtttgtttatttatttaagcaagagctctctctgcagagtggggtgtgtgtgtgtgtgtgtgtgtgtgtgtgtgtttgtgtttgtgtggggtgcttcagagagggctgaaattgtacctcttttctttcagccctctgcatttccccagagagaaggtttttttctcgtcttcatttcctttgaaacacctggggtgaggaaaaacctctacattggccaagcagaagaaacaggtaatatgtttgtttattcttaggcatttggggcaagcagaagtctacatcataaacatatatcgtgtggcaatggaacagggaatgtgtactccttggagtatatcttactgctttgcaatttctcggaatgattgttctcaaaaatgctggttgtaaatcagttgccatcagttgaagaagacgtacagatgacttggcaatctgaaggattgtggcctatttcaaatgaacttgatatttggaaaatctccrcagtcacttggattgagagccagaaaatgagggaaggggtcctttgagaaacccttctaggtcccctcagggagtattctccaaactccactgcacaccttcatatttagaaatcttcctttagttcccttggcgtcttgtcgtcttagaggtttctagctatctgtaagaatggaaccagaattccttacagtgttcaaaattctctttagtgatttagttcgtatgcgaactgatcagattggatcctgaaaccaaggcatagccttttagtgggcagacatttttgttctttaatgattaaacagagcgagtcttcagttctgccactaatcagctacgccagggagtgtgttatttgagtctcagttttgttcatctgtaacatggtgatgacgatactaccttgaaagtttgctgtgacagtgaactgaaataatagaaatataaagcacccactatgctgggtaaatagtagtcccttaataaatagtagtgattttagctactattatgattactggtatagcattctttccgatcttagacctctcaagggaaaagagcccattgctttgcgactcttaaattataccagaacctgtaggtacccaaagggtttagtctttgggaagccccagacaaagcattctgaagaaagagacttgaacaaacacagtgggttcccacccatgcatggcccctcctaactcatcagctaaaaacagttggtctttgttcaagctagttttttcccaccactcagtcctcagtacaagtcagtaagatatgcattattatcactgttttcttatgaggaaactgaggtacaggggaattaatgactaagagttcaaactcctgttgtctgacttctaaacccaaggctccactgggccagcattaggcagttaggaacaatagttcttgagatgctttacttcaaaagggccccttgctaggctctttgggaaatagtggtcagctctttctgagagattcacaatgtatgttcatatattaaaggctctgagaagtcctgcagtaaagaaacctgtccagctctacatcccctgaacttattatgtaatagtgggacctttattttggccttagtcctagaataataaaccacatagaactattcttccacaaacacactttggaaaacctggcaccaggccacgctgtttcctgattacaatcatgtctgatataccagcagacactttcaaacaccttctggtggtcagtatagtttcctcccttttcttatcctctcatgtggcgagacccaggaagaatcaccagcttggtcttacagacctccccttactcatttaagaccccagacataagtaattgctccactgttctactggaaaggtagtgatggaagggaactctctggcacgggctgccagggactcctctgcctcaccctatgcctctgcattatatttaggccacagacatcaggctataaaacctctgtggcaatgaataccaagcagaatgcaatagggtgagcctgatgaggcatctgttcctcatgctagcacaatctacgggggaagaattacacctgcctgcttcactcccactgtggtggtcgggggtgggggtagagggtgttggtatcagttgaatgactatgggttccaggttttcaggactagagctaaagccaatttcttgctaaagccaacatctctaggaaaagctgaattctagcataggaaactacgaaactgacatctagaatgccagagagggtcgtgtcagggtggctgagccaaggtgtggaagttggatagagatgagcttagaaatcagaccaccttaagaatgaacaagaacaactcggggaggctgggctagtggttggagggtgcttggtggcgaacgttagtttgtccccacggcctgtcttttgtactttccttgtattttcagcattggaagtgaaagattagcatgaaaaaaatggaaaattatcagttccacccagtcacccccaacacacacacagtaaaaaccttttagcggaaggctttccttttgcaaattataagtgagtgccaatgatgagtcattatttcatgtttactctttaaaaccatccttggtatatattagaagggacagcagcaatgggcaagtttcaagctgtttttttgccaagatccacccagcggctcatgttacccactaggacattcttgggcgtttgtgaaccctgtggaagccccccacctctttgagcctgagaacccttttcaggcctcagggaatcacttcttcagagacttcttcaatgcacttaaacgctaacagagggtgggaaatggaagcagcttagattttaccaagtcatggaaaatccccaatcatttttatcagctttacgtcagagatgtcctcaaaggctcacgcactgcttacaaactcacttccctctctcctggaagtctaggtggggcagtacatgggaggggtaagtggcatcttgctttaaccagctcatattttggtgagaatgaaaaagaactgactttttttgtaacctattacctgagagaaaaacagttaaaaataaactgataataattatttaataatgtaaaaattattatagccaattttttctaatggataatcaaaaaattctagaacatcatgtctttccatcatgattttaaaactttctttaaaaattatgtataagtactacccctttctgatttaataaaatgcttttgtataattgaatagcacctacctgtgcacaaaatgatggattaataatgacttytagcaactaaatttttaaagaactctggcctaggaatattgattcctttgttcattcattcrttcatttagcattatccaacatctgcaatgtgaaaggcaccatgtaggtgccagagattcaagggctactttggaagttgcccgtggggctaatagtctaacagaaatatactcaagtttgatgctttttagttcttactgaatcttttatatgcagttgtgtttgttgtggattaactgaggggtgactgaaaaccaaatgcctctggagagatattgagacagtgcttttttttttctggaaaaagaaaatcgaaattgaaatatgtcaatcagtccaatcagtgtttatggcctactaaatgctcaattctttttttcccctgttttcttttttaaattaaaaaacatacctttttttttttttttttaaagtcaggatttcactctgtcacccaggctggagtgcagtggtgtgatcacggctcrctgcatccttgacctcccagsctcaggtgatcctcccacctcagcctcctgaggagctgggactacagatgtgcaccaccatgcctggctaattttttgtattttttggtagagatggggtctccctatgttgcccaggctggtctcgaactcctgggctcaaaggatccatctgcctcagcctcccaaagtgctaggattacgaatgagagccactgtgcccagccccaattcttatgtcttcataaaaaggggtggaaaaaatagcatgaggatggagcgaagcccaagcgagatttggatactgttggaaaatagtgtttcttcaactgagatatggggattccttgcatcaaagttctcggcatggtgcactttaaatgtgtattccaaggcactggacttttgaatctgagtattgttagtaaagcctgggaatctgcatccccccacccccaataagtcttgtgagcactcgagttggagagcactgatctaggcacctggagaatgtcaccaggactagatgaattcctagatgaacagtgccccaatttcaaaaatgagaaaagaatatatgctagaagccacagacttgatatgacctctggaaaaattcagcttgaaatagatggagccaaagcatttctaggaaaatgtgatcatcactatgcagcaccgtgggttttctaaaataccgtctctattacagattgtcaaactttgttgtgtattagaatctggaaaactgaaaaaaatcttgatgcctcatcctccacccagtaccaattatgtcaaattatctgggggtgggacttgggcatcagtattttttaaaccccaagagattctgacttaatgaggtgcaggctgagtactgggagtttgaaaagctccccaggtgacactcatatgcaacgaagtatgacaagcacaggtctatatgacatgggacaagttgcttaacttccttgcactttgtgtaaatactaggtaattttaaaggtctctctcacctttaaacttctatgattttgtattaaaaatgttgccaaattgatttccttcctttcttcctcccctgcccttccttccttttctcctcctccttccctctctcttcttttgctggaataagctggaatgtcaaagtatcaaaatatatacatatcatcattttattaaaatatttagtaaaattctccaggatgtctcacagataaatgagagttatgataggtgagtttaccagctaactgaacaaatgtgctcagcgagtatgaaggtaacggatctgtggtgaacctggaggatggtttggagtgggatgccacagggctcatcctgcccttggatctgatcttgttaatgttctttagccatgatgtagataaggaagacacgaaagaaatgcctatcgaatttggaaataaagccaagcacggtggctgatgcctgtcatcccagcactttgggaggctgaggtgggcacgttgcttgaggccaggagtttgagaccaacttgggcaacatggtgagaccccatgtctacaaaaaagtacaaaaattagctgggcatggtggcgcatgcctgtagttccagctgctcaggaggctgaggtaggagaatcacttgagcccgggaggtggaggctgcagtgagtcatggttgcgccactgcactccagcctgggtgacagagcgagaccttgtctcaaaaaataaataaaaatttggaagtaacccaaagtttaggaaggctaattcattcaatacataaaataatcaggttcacctctggtcagaaaatctgtttactaagcttattgttattttcaaaacatggccatagttcaaatattttgcttattttagttttccctttcttcagtcgagttgaaattttgaagcttttggtgtagtaccaatggaaagatagatatgtcagttgtttgctgactttgtgcctgtcaagaaatgcaaatagggctgggcaagatggctcacacctgtgatcccagcactttgggaggacaaggtcggaggatcacttgagcccaggagtttgagaccagcctcggcaacatagggagaccctgtctctacaaaaaaataaaattagccgggtgtcacggcacatgcttgggaggttaaggctgcagcgagccgtgattgtgccactacactccatcctgggtgacagagtgagaccctgtctgaaaaaaaaaaaaaaaaaaaaggaatgcaaatatattagatcaggttggtttggagcatcacaaaataaaggaaacatcaccctaaaaagtgacgtgacagtatactatggaaaggaattttgttgaaaactcccgtgaagtgattatgggagtcagggagctcatgagaaggactatagaacacaaagttagactccagaggggcctcagcagtgcccagagagcttgtttaaaagggcactcttggccaggcacggtggctcacgcctgtcatcccagcactttgggaggccgaggcaggtggatcacctgaggtcaggagttcgagaccatcctggccaacacagcaaaaccccgtctctactaaaaatacaaaaaattagccaggtgtggtggcgcatgcctgtagtcccagctactagggaggctgaggcgggaggatcacctgagcctgggaggttgaggctgcagtgagctgtgatcacaccactgcactccagcctgggtaatagagcgagactccgtctcaaaaaataaaataaataaaaggacactctcacagattacaattcctaaatttggggggaggtttcaaacctccttttttttttttttttttttttttttttgagatggagtctcgctttgtcgcccaggctagagtacagtggtgcgatctcagctcactgcaacctccgcctcctgggttcaagcgattctgctgcctcagcctcctgagtagctgggattacagacatgtgccaccatgcttggctaatttttgtacttttagtagagacggggtttcaccatgttggccaggctggtctcgaactcctgacctcgtaatccgcccgcctcggcctcccaaagtgctgggattgcaggcgtgagccactgcgaccggctgcctccttttttttaaaacaaatgttcccaacttattccgcgaaatactgtcaaagaactcactttgaatttcagcatagctgttaaatatgttgtttttgtctcatagtcaacttccaatttgtgtttttaaaagcctagataggttgaattactttgagctgaaaaccaaaacagttaattatgtcagctcctccacatcccattccccatatttaaattagaaaatcgtacactctcatatttcgatttttcttttcattttgaatgctctattttatacagagctggatgtgacctagacatggagaaactcatttatgtctagcagagaagcagcctatagctgctctgtagctgctgctgtgttttggaaaataagccaggattagattatgtctgatcactttccacatcacatgatgaacagcgattcagaagaagcgtaaaatgaatcctgctgagcagcccctcagctaccatgtggttaactggcggtttccttccctccctcctgtgtattcctcattagaatctatgactgaagaggatcggctaagagtggttcctcgcagcttaaagggaggcacttttcacactctgtcttaaaatcagaagttgaattcatgaacacatatgatttagatagaagtcatgggatgcagcagttcttcaacgaaaaccaggagatctgacacatgtgagtactgggaatgtgcctgtggttatgaatgaaaaggggaaaatgagctgccctcaccctcttctcctttctcatttactcccacgatgctcaagctgccctgtgtgatttgcacaaggcatcgttagagtagcataggaaactacatttaggaagatgtagctttgaatttatgaagtaccataaagtattgtcttagagatattttgtgtttgatttaatttcattcgataatgtaccaatataaaatctcaatttaaaactcagtggcagggaacaagaaaggcagtgtaatttatatgtgtttcttcaatacttttataaatagctatatccctacttttgtgacatttagtagcatcattgaatttttattggattttataactcaatgatcacattatttctatatctattcaacacagaacttcatgagatttgcatcacgttttaaaaataatctaggagaattgggagaatgctagatcatctgtttccaaaaaaaaggtgtattgtttctaaatagatggcatgcctttctgtacccccatataattagaagcttaaatattcactttgtttattttgtactgaggttctttctcatggctattggcatctagttgaaacaaacttgagcatttaagggatagagtttccaacaagcaaattaaaataaaaacaagtaaataagctgggacaattaatatgagtaatttgctcttaaactccacttctttgatgtctaggttataggtaattcccccaacttctattccacgtcttgcctttggaagtttattcaggcttaaggtggagggtttaggatgcagagtgtgctatactaattagcgtgggatgttttactttgggaatcaaatgttattctcctacccagctgacttgtgctgatgatgtaggaaactcatctctgaaagtaggaagggacataggaggtgtactgactctttcaaatctttaagcatgtcatgaaataaatctttcaaaagctccatctgaactctactgctgtagtagacgtttattagcagagagtaaagagaaattatctttttatatctaggattactcacagttctttaaatttagccaaatttcctaggttaaaaaaaaaaaagccaagtccaacttgtaaaaacaaatcctctctctttttgaaatacttttcaacttttaaaacattgcatgtaagtggaaatattagcttagatttttggattgctttttctttcaaatacctgtgatttattgaggtgaaattcacgtaacataaaattagccattgtcaagtgaacaactcagcagcagttggtatgttcacagtgtcgtgcaaccacaacccctatgtacttctgagacatttccaacactccaaagtaaaaccccttatccattaagcactttctcctctcagcccctggcaaccacaaatctatattcagtctctatggatttatctattctggacatttcatgtaaatggagtcatatattatgtgaccttttgtgtctggctttgtccatgttgtagcatgtatcagtactatattcctttttattgtggaataatatttcattgtatgaatatgccacattgtatttatccattcatcaattgatagacatttggattgtttcagctttgttttttgttttttkttttttttgagacagtcttgctctgtcacccaggctggagtgcagtggggcgatctcggctcgctgcaacctccgcctcccaggttcaagcgattctcctgcctcagcctctggagtagctgggattacaggcacacaccaccacacctagctaatttttgtatttttggtagagacagggtttcaccatgttggccaggctggtctcgaactcctgacctcaggtgatctgcccgcctcggcctcccaaagcgctaggattacaggcgtgagccactgtgcccgacctgtttcagctttttgactgttatgaacaatgctgctgtgaacatatgttttccgttctcttgggtatatacctagaagtggaattgctgggtcatacggtagctttatgtttaacattttgagaaatttccaagctgttttcccaagtgactgcaccattctacattcctaccagcagtgtataaaggtttcaatttctccacattttcagcgatagttgttattgtctgtccttttgattttagtcatcctagtgggtatgaagtggtatcacaccatggttttcatttgtatttcagtagtgactaatgacattgagcatcttttcatgtgtttattggctatttgtatatctgctttggagaaatgtctattcagatcatttacccatttttaattgaattatttatttttatattgttgtaagataaatttatatattctagatacaagtttcctatcaaatatgtgacttgcaaatattttctctcatttgttgaattctcttcatcctttcttaatggtgttctttgaagcacaaaagtttttacttttgatgaagttcactttattttttctttggttgcttgtgattttggtgtcatatctaagaatccattcccgagtccaaaaagatttttgctcacgtcttactttaagagttttgtaacaactcaacaagaaaaaaaagataactccattaaaaagtgggcaaaggtcatgaacagacattttttcaaaagaaggcatacaaatggctaacaaacacacgaaaaaaatgctcaacatcactaatcatcaggtaaatgcaaattgaaaccataatgagataccaccttacataccggtcagaatggctattactaaaaagtcaaaaaataagagatgtaggcaaggatgtagggaaaagggaatgtttatcactgctggtgggaatgtaaattagtacaacctctgtggaaaacattatggagatttctcaaagaactaaaaatagagctaccaaactaccatttcatccagcaatcccaccacggagtctacccaaaggaagtcattatatcaaatagatatctacactcttatgtttaccgcagcactatttacaatagcaaagatatggaatcaccgtaagtgtttttcaatggatgattgggtaaagaaaatgtgtggtgtatgtatatgtaagtgtgtgtgtgtgtatatatgtgtgtgtgtgtatgtgtgtgtatatatacgtatatatgtatgtatgtgtgtgcatatatatatgtatatatatgtgtgtgtgtgwrtatatatatatatatgcatgccatggaatactactcagccataaaaaagaatgaaatcatgtcttttgcagcaacatggatggaacaagaagccattatcctaagtgaaattactcaaaaaacagaaagtcaaataccccatgttctcacttaaaagtgggagctaaataatgtatacatatgggcatccagaatacaataatagacactggagactcagaaagctgggagggtgggaggggggtgaggtatgagaaattacctaatgagtacaatgtatgctacttgggtaatggttacgctaaaagcccagacttcattatacatgtaacaaaattacacttataccccctaaatatatatgtttttaaaggccaaaaaaagttttgtacttttagctcttacttttaggcatttgaaccattttgagttgctgattttcacgtatggtgtgaggtaggagtacaaattcattttttgcatgtggatatccagttgtctcagcactgtttgttgaaaagattgttctttccccattgaatcctcttagcaccattgtcaaaaatcaattgaccataaakgtttatttctgggctctcaattctattccagtgatctgtatgtctttcttatgccagtaccagtgtctggattactatagctttttttttttttttttgagacggagtcttactcttgtagcccaggctggagtgcaatggcacaatctcagctcactgcaacctccgcctcccaggttcaagtgactctcctgcctcagcctcyggagtagctgggattacaggcacaaaccaccacatctggctaatttttgtatttttggtagagacggggtttcaccatgttggccaggctggtctgaactcctgaccttgtgatccrcccgccttggcctcccaaagtgctgggattacaggcataagccaccacgccaggcctactatagctttttttaataaagttttgaaattgggaagtatgaattcttcaactttgtttctctttttcaagattattttggctattctgggtcccttacatttccatatgaattttagaatcaatgtgtcagtgtctcaaaagaagccaagtggaatgttgagaggggttgtgttgaatctgtagatcaatttggggagtattgctatattaacaattaaataatctgatccatgaacatgggatgtctttccatctatttagatctttaatttctttcaccagtgtcttgtagtgttcagagtataagttttacacttctttccttaaatttaacctaggttttttattctttttgatgatattatacatggatttttgttaatttcatttttggattgtttattgcaaatgtttaaaaattgatttttgtatattggtcttatatcccaaaactttactgaactcattagctctaataggtttttagtggatattttaggaatttttatttacaaaccaggtcatctgcaaatatagttttacttgtttctttccaatgccttttgtttcattttcttgcctccactacaatgtcaaatagaaatgcaagagtagccatccttgtcttgttcctgatcttaagggagaaacattcagtgtttcaccagtaagtcttatatcagctgtgtctttttcatagatgctctttctcaggttgagaaaacacactcctattcctagtttattgatttttttattattacaaagtggtgtttaattttgtcaaatgctttctctgcatgtattgagatgatcttgtggtttttgtcctttattttatgatatggcatataatgttaattaaatggcacattatgttaattgatgttaagccaacttcgcattcctaggataaatccccttgatcatggtgtataatgctttttatatgctgctgaattcagtttgctggtattttgtagaggaatcttgcaactatattcataagagatactgatctatagttttcttgtgatatctttgtctgatttaactgtcagggtaatattggcctcatagaatgagttggaaagtgttcccttctcctccattttttggaagagttcatgaagaattggtattaattctttaaatatttggtagaattcatcagtgaagctatctgggcatgaggttttctttgtgcgtagtttttttgattacttattctgtctcttgttatatgactatttagattttctattccttcttgagtcatttgtggtagttctaggaatttgcccatttcatctacattatctaatttgttgacatatacttgttcagagtattcccttaaaattcttttttttttttttttttctttactgctccattgctccttatggagcagggcaaacccatatggagtgcgtccagaagagccatttaaaattctttttcttcttttatctcttgttggatatgccaatcaaggtttattatgagttcataataataaatctgctgaaagctgatgcagtgatgtttacttatatttattcatagacaaacattgtgtgcataaaattttctctcattcagatatttggaaaaaatatagaaaagcagttgaaaataatgaatactccctcatcattccactacccagagataatgacaacattctgataatttccttcaatgtattttttgtatattatagatttctgatcatcctaaatgttagttttttgtagcctcactttcagcactaaaatgttatgtaaacatttctcaagttgttataaatgctttgcaaacatcattttagtcattgctaagtattttatttggtgaataggccataatatgcttaattattcttcaaatattggaccttttaatactaatataaataacactttgaagaatttctttgtgcaaagccttttccttattttggattatttctatattcaggtgattagatatgaaattatcgtgtcaagggctataaatattttgaaagctcttgatagaaaatgatagatattatttcctgattactaaccatattccaaagagtgttcaacataatctacatatgttttatctaatccttgtaataaacctgaataaagggttattattcctgtttgtatagtggaagcagctcatgctcagtgtggtacttggtaagtttgtttttcgtttttttgtttttttttttttgagatggaatctcactctgtcgcctgggctggagcgcagtggcatgatctcggctcactgcacccttcacctcccgggttcaagtgattctcctgcctcagcctcctgagtagctgggattacaggcgcccaccactatgcccagctaattttttgtatttttagtagaggcggggcttcaccatgttggccaggctggtcttgaactcctgaccttatggttcgcccgcctcggcctcccaaagtgctgggattataggcgtgagccaccgtgcccagcctacttggtaagtttatgcagcttacagctggcagagttgggatttgaattcaaggagttttgaygacaaagtattttttgctgtcacccattacaccattttatgccacctctgaatgttgctgcttcagaagctagctttaattaaatttacttatatacagtaccttgtatttgcatagtgcttttcaagttggccaggccctgtaacatacgtttgatcctcacagccttttgaagggttgttctcagtttgcagaaaaggaaatgaggctttgaaaggcaaagtgattgcctcaagggaacacagcaagtcacagagccaaggctcgtgcttgattcctgtttccactggtctgactagtgttaagggttttttgtcctgctaggtcgttccacctgaccacagtactctgcctctggagtatcacggcagtttgagaaagcgtaacctacatataaaatcgaggctattccctttcttgtgctctacccagcttccatgtagagaagtagcatcgggccaggcgcggtgactcacgcctgtaatcccaacactttgagaggcgggtgaatcacttgagcccaggagtttgaggttgcagtgagctatgattatgccactgcactccagccaggaccaccactgagtgagaccctgactcttaaaagaagaaaaagaccaggcacagtggctcacacctgtaatcccagcactttgagaggctgaggtgggtggatcacttgaggtcaggagttcaagaccagcctggtcaacatggtgagacactgtctctactaaaaatagaaaaattagctgggcgtgacggcacatgcctgtaatcccagttacttgggaggctgaggcaggagaattgcctgaacctgggaggcagacaggttgcagtgagccaagatcatgccactgcactccagcctgggcaacagagtgagactccatctcaaaaaaaaaagtaacatcaattttatattgtcattgttattttatttcttttgtgatatgtagcaggtaagagaggactaataatagctatcatttattgagtgcctgctactctcattatttcttaccaaaactcttaaagctttgattagtctccctcgttttataaatgaggaaagtgagacttaactgccccaagttacacactcatgggtggcagagcctgaattggaaccagatctggcagattccaaagttcatggcccttctgatatgctaccctgacttggagaattggaatttatccacataacagaaattaaacattgcaatttcattctcctgaatttcacttgacacttaaaattttatgttaatggtatttcaattaataatctattgcctttttgttcccatggagcactttggaaacactgatatattttatttcttcccttgagaccacttagaaatgtatttattcaatttctgtaagtgctaagaggccgacaaagacaatccgtgcttttttggctttgtggtttgatgcgtaagctgtgacaaatagaagtttctctaaaggaaattgttcctttcaaaagtactcattctttattttatatgaaaaaaacttaaaaatactgaatagcaaactaaatatttctttaattcttggtaaaacatctagttaatttagctgtttaaaaatcaaacaatcgccaggcgcggtggctcacgcctgtaatcccagcactttgggaggccgaggcgggtgaatcacgaggtcaggagattgagaccatcctggctaacacggtgcaaccccatctctactaaaaatacaaaaaattagcagggcgtggtggcgggcgcctgtagtcccagctcctcgggaggctgaggaaggtgaatggcgtgaacccaggaggcggagcttgcagtgagccaagatcacaccactgcactacagcctgggcgagagagcgagacaccatctcaaaaaaaaaaaaaaaaaaaaaaatcgaacaatcaagccattcacagctgcttgagagcccccctcccggctctccatccccatctccttactcccaatttgaagtcctttactgtgatgtatatttcagtttgagaccttcatggaaaaataacaaatgaaaatctttcatctttggtgttccctaaagaattttctccaagtttagagggcctcttgccattctccttgctattgtttgtcagagggttctaggttatcatagccatcaagcagtctttactgccaccgtagggtatattgaaaatccctgtgaactcggaccgtcctcattttcctcctcaatgaactgcagacagagaagatgctctttcaagtccattgtccctctaagactatccgtatgctctgtagctgtgggaggggtaggtaggggagggcattgattttccttctgcctctcctgctcattccgctagctattgctcatcagcatcttgacatgctcggtgactttcctctttttttcctttttccttttttttttttttggtttgtatatatatatatatttttttctcaagccattttgttttgcttttgttttcctccccaaatatttttgaaaattgcaaacctacagagaagatgaaagaatagtacataaacacccgtttgaaataatttgaaaataagctgtagacattatggaattaacctctacgtacttcagcatgcatctactaaaagagggatattctcttatataactacaatactagatcaccctgaagaaatttaacattgatagtgtaacattatctaacatgtagtccatattcagaatttcccagttgtccaaaattgccctttgtaactgttctttccttccctttaaaataagtcttctctggccctctcatcccctccagttcctctcgtctctctcctccccttcaagctcgctccttaggggtgcatttgtacccgctgtctcctacctcctctttgatcccagcccagggaagatgatctgacaggttcttgaatgacctcgaagtccaatggagcattttcagtgctgattttgctcacttcctggcagtctttggcactcctgcccactcccttcttactactcattgcccttggcttcaggggcaacacattctcctggtttttcttttaggtctctgcatgaactatttatgtggactctactttctcctggcttttaaatgttggggctcctctgggttcccccttggctctctggttttgtcactctaacactctccttggatgctttttctagtccatggctttgacatcagtgtgtcaagactccaaatctttattttcagcccacatcatatgctctaatccctgttttattgggaatcattttaaataagtacttttctttgtaaaaggagaccattttcttcatctgaaatcatgattcctctcactaccaattcttaggtaatagtcaccgtttgatatgataatgtgttggcctggaggtttgtataggattggtactacaaacacatttaatgcctgtatgaaacagacaaaacaaaacaaacccatcccaacaacctttttattctttacaccaattaaatacatcttcatctttttatttgctgtgtgattaatttacctttgctttaaaaatttcaagtattttgagactctgataggggctatttagatatccattttagaatcgtgaacctttagaaggcagaaaggccaggtgtagtagccatgtctgtaatcccagcactttgggaggctgaggcgggaggatcacttgaggctaggagtttgaaaccagcctgggcaacatagcaatacctcgtctctaccaaaggaaaaaaaaaatagctggacatggtggctcgcacctgtagtcccagctacataggaggctgaggcagaggatcacttgagcccaggaggatcacttgagcccaggaggtggaggctgcagtgaaccatgatcgtaccactgcactccagcccgggcaacagagcaagacattgtctcaaaaaagaaaaaacaaaaacacacacacaacacaacacaaaacccaaagagagcagaaccacctctttgtttaaatgatttttactggcttccagctttactaggaaattcacaaagaagccagctttccagttgggtcatgttaattgttaggaaatcttgttacagagagacctattgcaactaagtgcaagaaaggacaatccctcagccccaattgccagttatttcccatattcagaacgcttttcttatatgattatggctttatatttcattagcttttagcagctgcaaaagacaaaaatttaatgcggatcgtatttgaccttggatgaacgaacatggcaatataacacagattagtaattaataacgagggagacataaaacagaatttgcagtcaagatattatttcctgagtgaagattaaaggttattattgaattattgaatagaacacatttcctatgagagactattttaataatttaaaatgataggaattcttttatatagcaaaatttcttttacatacttaagaatacaatagtttttaaaaattaatgtattcataataattcttttggaaaattggcaaaacataatatggtaggaaggttaacagttacttgtaaactattctcttggtctgagtgttttattgagttggcctattattttggtatggtataaatgaagcatcacattttcctgaactagtgatatagccaaggattacaactcatctttttttttttttttttcttttttgacacagggtctcactctgtcacccaggctggagtgcagtggcgccatcaaggctcactgcagcctcaacctcctgggctcaagtgatcctcccacctcaacctcccaagtagctgggactacaggtgtgtgccaccatgcccggttaattgttatagtttttgtagagatggggtttcatcacattgcccaggctggtcgtgaactcctaggctcaagagatctgcccgcctcggcctcccaaagtactaggattacagtcatgagccactgcacccagtccaaggatgacaactcttaaggaacctttcatgagatggctttatgtcatcttcatgttgttccattgccctgttgaatcaaatagggctttaaatgggccatttaaaaatcctaatcctaataaatgtagaagaaatgagttcaaaaatcactgttttgcaaccaccatagaaataattgatttaagcaaaaatcatcaatggatattttggagaacagaatgtatacacagtctcaaagcgtgttcctgcaaactgtttattaattgtaaagaggcaaacacttctacagtagagaagttcacatggacaccaccttacccaagtgatccaagttcgctcagtgataatgagacagatgagcaccacatgccttctgatgtcctaatgcactgagaaagacataccacttatcctgccaaaatacacaacctgaatctcatcacgaggaaaagagcagacagatccagattgagggatgttttacaatcaactggcctgtactgtttgaaaatttcagtgtcattgaagagaaaggcagaggagttgttccagaataaaggagactgaagaaatgacgatggtatatggagagagagagagagagagactagttattaacaattatactatctttactttttcatacatttgaaaatatttcagccgggcgcagtggctcatgcctgtgatcccagcactttgggaagctgaggcgggcagatcacctgagggcaggagttcaagaccagcctggccaacgtgatgaaaccccgtctctactaaaaatacaaaaattagctgggcatggtggcgtgtgcctgtagtctcagctactcgggaagctgaaacaggagaattgcttgaacctgggaggcggaggttgcagtgagccaagatcgcgccactgcactccatcctgggtgacagagtgagactccgtctcaaaaaaaaaacaaaaatttctttcaaaagaaaaaaccctaatcctgtacatcctgagataagtttaccaagtttgtagtggtggcaacctaggcttatgtcctttggtagtaccattttttagccctttcttgtttttgccatctaccaacttcattcattgaagactctccacccactctgagcctcatactgggtatcttcactgtacatgtgaataagccccaaatgctttggtgtctgagttccttgatctcctgagccccagaaacyccctcatctcctcaacttcagctgctcactcccatttactggcccccatggtcacctggaaaagccccacctctggaatcttcatgattatcatcctattctctsattgcttggtcttctttgaaacctctgagccttagatacttcacatgtgtctctatctcccagcctccagttttatatagattttgggaatacaggtgcatttttattacatggatatactgcgtggtggtgaagtctgagccagccctctcttgtcttccctttcttccccatccatcttccctccatcttttgttggctgtcacttgaaccagttaacagatcatacaccttagtcatattttaggcagttaaaaaaaytaatgtgtgaaatgtttagtgttcccaaaccaattgctagcaaactttggctacaattccttgatggaaaagccagagatattagtaacttgtatttttctacagggatgattccgattgattgatttattttcaaatagcctttagaatttgtctcctttgtccagaagtttctggtttgagtgttcagttttgcacatcatatcgtgcccttggatggttattttcagcttttctatgtacagtgataggtgggctgcagcaatggcactaaaaacaagtagatggatgagttagagtatttgrtaactggaaagaatcttagagatcacacartccaaagttctcattgtttacatgagaaactgaggacctcggagtttcgttgatttgcctgaggttacttagctggcaactgggtaagtcagggcccaaatggaagtatctcaatgacaaagtcagaacttatttttattaccccatgtggatggggttggtgggtacgagagtaagtacatagaatgttgtagaaatgacctgttattctcgctcttgtctcactggaaggccagaggttcctgagaatgacacaattatgatctcttttgtcccttagggaaagtgatagttgtgtttcaaatgcctgacattgtttggagactggacttcacactttactctcttctttcagaaaagtgtctcccagggacaaggcctctgtgttgtggccttgctctgcagggctgccagagtttgtggctgagcgagcctcataaggtgtctgccttgcttgctgcccaacaagcaggctttgtgtctgtctcatgttcactgggcatgtgctttgagctgtttttccagtgaagtcagaagtctcactgggacagccgcacattctggcagatggcagatatagaaaatctgtaaacaaaaataacagtaatgaagactgtggtcctaggccagagttcagccrtatcctcttctcatcatgctttgaacagctgaggttatagatgcttctcctcttcgcttaaagccttttgctattagaggattcattttctttccagttcattcgaattcattttaatcagctgtgtcgcacttgtgcctgggtctcttcttgcctggaggccaggccccttaaaggtacattaaatattcgctaatcctgctgcttcctcaggattcctctgccagaagaatttcaaaagcagagagcctttaaataccttatcattctgaatatgaaatgtcttgtttgaagaactatctgtcaaataaactcctatttaaaaaccaaaaccaaaccaaacataaagactctaccagccagcacaaagagaaatgtaagacacaaagtcttaactaaacagtcatttcatttgttcaacaaatatttattcctgctatgttccagagactattccaggctcaggaaatacagcagctaactcaacagatcaaaatcccagctcttatrgagattacattctagtggaaagacacagacaatgacaaagaagtaaatatcacatggtgataagtgctatggagaaaaaataaggaaggagataggcgatgaggggagrggagaccatgtaagaaggggtggtcaggaaaggcctcccgcaaaggtgatgtctgagcaaaagctgcaggctctaactgcatgcacctcagttggccgggctcttcttgctctaggctgttgtgttcggagatggtagcctgtttgtccacagtaatttgtgaattttttttttttttgtgacggagtctcgctctgtcgcccaggctagagtgcagtggtgtgatctcggctcacggcaacctccgtctcccaggttcaagcaattgtcctgcctcagcctcccaagtagctgggattacaggtgcccaccaccatgcccggctaatttttctatttttagtagagacgaggttttgccttgttggccaggctgctctcaaactcctgatctcaggtaatccacctgcttcggcctcccaaagtgctggggttacaggcgtgagccaccatgtgcagtcataatttgtgaaatttctaatgaaatattatgtataattaggaagtctttgggacttaactggaatttgttagcctggagagagacaatttttaaaaaagtatctcccatttatcgagtgcttcctatatgacaggcaatatgctaagcattttatatgaatcaattaatatattactaatacctatgtcaacagattactaatacagtattatgtattattacaacacccctagaaggtgttcattcattcattcaatcattcattcaacaaatatataatacatttccaggccttgccccaggtgctgcggatgcagcaatgaaaaaaatgaagttcctagctaataggggaaaatggacaataaacccatacacatataactgtagacaatgtcagatgctcaagagtgctacagagaacagtagaacaggtaaagagatagggaatgtgagcgggagaaggtgtgggaggagatgctattctatataccatctgattttttttttttttgagacagagtcttgctctgttgcccaggctggagtgcagtggcatgatcttggctcactgcaacctctgcctcccgggttcaagtgattctcatgccttgtgcctcagcctcccaagtagctgggattacaggcatgcaccaccacgcctggctaattttttgtatttttagtagagacagggtttcgccatgttgcccaggctggtctcaaactcctgagctcaggcaatccacctgccttggcctcccaaagtgctaggattaaagacttgagccactgcgcctggccccgtctcattttttatggctgattccaaatgccatgtatatagcaaaatgaggatgagcccaggttctgaaattacagataactggatttgactctgcattgtccctctgacaagtgacatgaccccagacaggttgtttctgagccccagtttccttatctgtaaaatagggacagtcacacttgagaggattgttagggggaggatgaaatcaaatcacgttgaagtagatgatccacataaagcacgaggcacaatgcctggcacaaagcaatcactctgaattcattatttgtcttgctcactaaccccgtacatgactatttaatttcttgcaagataccatgatagtgattgccaccagagaaaagaatctattaaaacaaaacaaaaaaccagcttggcaatagagaaaccacctactggccacagaaagttggccaggtaacttattgaatctatgctgttgcttctgtctagaaacaaaaatagaagacccttgctacacatgctcctcaatagcatgcatttatttattcattcgttcgttcatttattctgcatggaatcaatgtgaccgggaagagaagccctgttatcagatgaagcagcaggaccagaagtagatctaagctgtccaataagtttagaactggatgacgcagatcttcaactctctgggcagggtggggggttatgggggccagcaacccctcgggtagggtctatcatgcctgcattctaccctttgctattttggaggtttcttctccaggggagggtcctcagctggctagtgctgtcctgtggtggatggggcttaggaattaggtgaggttttggaggtctgatattggtatgcccaaccttgctgggctccttccctctcctggagaggtttccttgggaaatgtatgcccaagggacaacagcaggatgtggatcaaagtccactttattagctgctgcacaagtaccccaaatctcaacgtagagctctaatgacggcgtgcgttggagcctgcaggaagttggaggcttgaggtcttagcaggacctatttttcccacccctctgagatgagctcatcgggcagggtctagtcaggaggcagaaaccacagagtgatttgaacagagagaattgaatgtaaagaactatagcaactgcagggaagttaccaccctagagttgagagaacaaagggaaaagggtggaattattccggttgagaaacttgcaaggagggtcccacagaactgaagcccagacctctgagaagtggtgcactcagctggtgctggtatctccggggctgccatgagactggctttgcaagtgctggatgagctgcaaactggatccgacgactgttacctggggtgaagagcagttgctaggttacactgtcaggaacaggaagcagacaggaaggagtgtgtccctagtccctccctccagccttgcagtctgcctttcccacccctattggcagagcctcacagggggcaactgacaaagctgaaatggggtctgcaaagtcccagcctcagcaccactgtgctgactagggaagggtggggttagagttgagacctgatagcttaataagtggcatgtgtgctcgggtacaggcgtatgagcataggcagagatggctgcttcccaagctggggtggggtggggcagttccgtttcctgactttggagtagaagaggaagtagaagacagaggggaccataggtgtttataaacttcctatgccacagtttacacccctcccagtggaacccagtgaacgtattgtgtgctatatacaaaacagcagctcctcccttggagagtggggtggggatggaagctaggcagagatgggagggggcctagcttgcctctttctccgcatcagggaggagaagtggcagtagatgtcaggtgtccagctagtgccagccacttagtaggcattcaagaaatggtgaatggccaggcgcagtggctcacacctgtaatcccagcattttgggaggctgaggcgggtggatcatgaggtcaggagttcaagaccagcctggccaatatggtgaaaccttgtctctacagaaaatacaaaaattagctgggcgtggtggtgggcgcctgtagtcccagctactggggaggctgaggcagagaattgcttgaatccaggaggcggaggttgcagtgagccgagatcgtggctctgcactccagcctgggctacagacgagactctgactcaaataaataaataaataaataaataaataaataaataaataaataaatggcggccattattattcaaaggaaggaaaggtacacataggttagggaatgaagtaactgactggagtggaaagagccagaggacctgagttcatactaaataagtgacttggagcaagagactcgcctttctgaactcaaaatttccttatgtgtaacatggagatgatgatgcttgtggggaccaaatgtcttgtaatagacccttaacatatgatagttattttgttctattattacagaaatagtaataagctcagttatttcttttttttttttaatcgaaatggagtcttgctctgtctcccaggctggagtgcagtggcggtgatcttggctcactgcaacctccgtctcctaggttcaagtgatcctcccacctcagcctcccaagtagctgggattacaagcgtgtaccaccgtgcccagctaatttttgtatttttagtaaaggtggggtttcaccatgttagccagtctggtctcaaactcctgacctcaagtgttctgcccacctcggcctcccaaagtgttgggattacaggcgtgagccatcgcacttggccaagcttgtttatttgttattgatgttgctaataccaaatagaagagacttcagtgatcatttattctacaacatcattgtgcagatgaagaagcagaggcacagaaaagatcaatagctctatggaggttaagagcttgggctatggagtcagtcagaccagggttcgaatcctcactgtctatttccacttaccagctaagtgagctttagtgagttcctcagtctctgtcagcttcgcagtgttgtgaggactgcaggactaatcaatgcatggtcctttgtaagtgcctaggaagtggcactggaaaggtaccattgtgcttgtgagtatgagaacccctgaggccagagggtgattcatcatgatagcgactgtcccacagaacaggcctttcaggtgaccctagagcctccatcatggtattgtgagaacacttcagatttcagccatgccactgccaattatttgctttgcaaggttgaagatgtgtgtagggaaaatctttttcccctaaccattttttttctccactctcacaccacagcaatcatcaacacagaagacttctgtgaccaaatgtgtggggacttttctgcacacaccaagcagcagataccagctgggtgtcctctaattcagattctgacattatctacccagagatagtgtcagatcccacaggttgagggctcagtccccaagactgcctacccaccccaccccaacaccagttgcaagttaagacctccagaacttctgactgaccagcttcaagttgggggttcccatgaccccctctttgggttccattattttactagagcagctcacaaaactcagggaaacacttccttacatttactggtttgttataaagggtattacaaaggaaacagataaagagatgcatagggcgaggcaagggggaaggggcaggccaccctcccagaacctccactgtttcgctatccggaagctcactgaacccggttctcttgggtttttatgaaggcttcaagacaacagcatttcttcccctagggcatagagccttaagcccataatgagaaagtcaggggaagattagagccttggggcaggtgaaaggaggacaggaggtcagaggctgcccctgaggcctaacatacccgacatcacaacaaaagactgtatcagggccatggatgaaaacctctctctctctctgtctctctctctctctcgctctctctctctctatmtatatatatcttgtattagtttgttttcacactgctgataaagacataaccgagactgggtaatttataaagaaaaagaagtttaatggacttatggttccacatggctggggaggcctcacaatcatggtggaagggaaaaggtacgtcttacatggtggcagacaagaaagaatgagcgccaagtgaaaggggaaaccccttataaaactatcagatctcatgagacttattcactaccaccagaacagtatgggggaaaccgcccccatgatcagttacctcccaccaggtccctcccacaacacgtgggaattttgggggctacaattcaagatgagatttgggtggggacacagccaaatcatttgtatattataacaccacaacatgtcactctatttcttcttcctgtggtttttccctataaagctcatgatacgtgatgttgggtctatttcctggggttttctgaaacctgaataatggaaagagtccctggaacccaagagccttggggaagctaataaattaaccttgcgagacgaccaggtcctgggatattctgtgtactgcagcagtactaaaccagaggatgctgagactgggggctggacccctgctttcagaactcacatcgttcctgttatagtcaactcttattttttatgcaccaactgggaaaaacgatagcatgaataaaaggagccagctggtgttgattgctcttcactctaaaactcgaggaggcataagagactgtattttaaatctcattacctcttacctgatttctttcttcaatatgatgaaactacaaggtggctcaaaggctaccttccccagaagagagacagtctgcctagatagtccacaaacaagacaatacttccagttgccatttacttagcatgtgctttttaccaggcattgggctaaactcttccccttgtaacatctcatttcatcctcatagaaactctgtgagggagggggtgtgtttctttatccacctgcattttatcaatcgaatctcaggtgcagaaggtggtgtgaatcatacgtttccatcagctcattgaacattatcatcattggtctgtgcaagaccccttcttatgttaattagtttattcccttctcttcatgtaccccacgctcattcactcccctataaataaccggtccattatgtgttgtgtgcatctttccctttgtatatgttcttatgaaatgtggttttgtatctatatagttctattgattaaagtagtatttcattctgtctctgactttttaataaccattccaatggaagtactatgtttttaagacctactggttaggttgctatgggtttatttaatctattgcttccagttgtgttgtgctactccgtggtgtgcacccaccaaagatacagattctctttcctagtgataggcagccaggcctatttgtatcaaacttcctattgccacaaagaagcaattgcatccccatatgtctccttgatggactgtgtgagaattgcctttggggtacgtagtgaagaatggaattgctacttcatagggtatacatagattcatagatttactatgcttaagccatgccaaaggtaggtgctgttattattcctattttacagatgaggaaactgaggttttgagagttttaataacttacccaaagtaacatagacggtaattagcagagctaggattcaagttcaggcagtcttactccaaaacttctgttcctaatggctgtgccatcattattctctgagtgtttgagacatgaggacattttataaaaaacataaaagtcaatctcattgtttggtgttttaatattcttagaacctaggaatccaggtggactgctttttttttccactgaagcacctacttctcctaacaggtgcatagtaactgtttttctttgactttcatattctgtgggtctgcagcactgagagctgcgttgatcatccagaactggtaccgaggttacaaagctcgactgaaggccagacaacactatgccctcaccatcttccagtccatcgaatatgctgatgaacaaggccaaatgcaggtctgttttgcaagcttttctcttcttttgataaaatgattctctttaccccttgttattgaaagaatgaaagtttgggtccattttaagctgaggaagcttggtgaaaggctttaatagagcatgtcatgacattgtcttggaactagttattgagagagagtgtgctttgggaaaaggatggtgtttttccgttttgaagttcacatttttaagagggctgcccaacatctggttaactaataaaaatagtcttattctattttggggcagatgccttaataggaaataaagttgtcattttataaaagaaaaaaatacttcaaggggttaaaaaatggcagaatttcctagcaacaaacctctgcaagctctagaagaaaatatacatgggtgaggaaggccttttttttttttttcttcgagacgggatttcactcttgtcacccaggctggagtgcaatggcacggtctcagctcgctgcaatctccgcctcctgggttcaagcgattctcctgcctcagcctcccgagtagctaggattataggcacccaccaccacacccagctaattttgaaatttttagtagagacagggtttcaccatgttggccaggctggtctcgaactcctgacctcaggtaatccatctgccttggcctcccaaagttctggaattacaggcgtgagccaccgcacctggccaaggaaggcctttttaaagaatacataaatctagttttaatgcttattaattttaaaaaagtacttttaacaataaacagatcttagaaagatctccaatatagttgctaatgaaaaaatcaacttttaaaacaatatgtagagtttatctcatttatgtgaaagaacatgaaacatacagcaaaagtctggaaaaagatacacaggaaattgtttacagtagttagttctgaggacaggaatggtattggtgggtgtgggttgggatgttaagagggacttctcatttttatttgaaattatttgtagtttttagcaatcatatatctgtgtatcacattataatatttaaagataattaagaacattccaaaaagaactaagttgctagatttatttttggcagctagaaaaatgatatactgtgattcagtcagatgctccctttgtctagattaggaacctcagcataggctgtctttctaagcactgtagaatatagtgataaatatacaggtagagtgaatcccaaattggtatgctttagacacattccagcaccagtacattattttctattgattctttattgagatgtaattcacatgccatacaattcacccatttaaagtgtgcaattcaatggtttttagtatatgtacagggttgtgcaaacatccccacagtcaattttaggacattttcatttcccgcttcctaaactccgtacccattagcagtcatttccccatttccttcccccagtccctggcaacgactaagctattttctatctctatggatttacctattctggccatttcatataaatggaatcatataatatgtggtctttgatgtctggcttcttttttatttatttatttttttgagacagagtctcgctctgtcgctgggctggagtgcagtggcacgatttcrgatcactgcaacctccgcctcccaggttcaaccgattctcctgcctcagcctcctgaatagctgggactacaggcatgtgccaccacgcccagctaatttttgcattttcggtctcccagagtgctgggattacaggcgtgagccactgtgcccggcccagcttcttttacttagcataatgctttcaaggttcacccatgttgtagcacatatcaggacttcattcctttttagttaatattactcattccgaagaatattccattgtatggatggaccacattttggtcatctattcctcaggtgatggatcatttgggttgttccaccttttggctattatgaataatgctgctgtgaacatttgtatgcaagtttttgtgtgaacatatgttttcagttctcttgggtatagacctgtgagtggaatgtcatgtagtaactttgtgcttaactttttgaggagctgctaaactgtgttccaaagcagctccatcgttttaccttcccaccagcagtggatgagggctccaatttcttcacatttttgccaatacttgttattatctctttttgattatagctatcgtagtgggtgtgaagtgatgtctgattgtggtttctattgactgttaatggacaaacccatcatcaacagcattaaaatcatacattttgataactgtatggaaagtcttccttctctcaattcccaactcccagatctactcccagattgataaagtgtttacttttcatgagaggcagggcttgaaaaagaaattatttgtgctgtacaaatgcaggtctttgcagatacctggtggccatagagccagtaccctgattgtggctggaaagctggtgaagttccacctttcccttcctttctttccaaaatatatttgatatttaagaatattccttaactcttaatttcaccaccaaaaagaaaagagatcatgaccgggtgcagtggctcacacctgtaatcctagcactttgggaggccgaggcaggtggatcacctgaggtcaggagtttgagacctgcctggccaacatgttgaaaccctgtctctactaaaaatacaaaaacattagctggacatggtggcgagtgcctgtaatcccagctactcgggacactgaggcaggagaatcgcttgatccggggaggcggaggttacagtgagccaaaattgtgccattgcattccagtctgggtgacaagagtgaaactccatcttaaaaaaaagaaaagaagagatcataatgaacaaaatttggtagctgtcttacgttggatttcctagaagcagaggctgagacagggattctggtacaagtgacttattgagggtgtgttttcagggaaagcctgtaagggagtgaggaatgcgagacaggacaggggagaagctaggccaagatgtactttttgaagtctgacctcagcctgatcccatctggagctgtcaagtgtgaaatgcactacagtttgtccctggcagaggcaagggaggtgggggactgggctgttacacccttgcttcagccagtcgttgtctctgggcagccccacaggaggggcgttcatgtgttaccctgtgttgctctggatgcaggcagtcctctggaggcaggcatagaagtgacccttagcacctgcagcagctgagatacaaatgccccacaagagtaagggcactcgggtggaacaccaacagcatttgtcacagtagctgtttggggttcactaattgattaatttttttttattttgtccagttatccaccttcttttccttcatgttggaaaactacacacatatacataaggaagagctaggtaagtaaaaagcttagtcttttcaaatgtgtcattaaatattgaattgtcttcatcaagagcggtaaattctgaagatgggagaacactatgaaattaaaaagatgcctacctcttttgtttatgtgacacccaacaactggcaacatcagttcaagtggcctttttccctctctggatggtgtcaactaaatcaatcatttaactttttcacttttccaaaagctgaattagaattcattcaatattcatttgttgaatgccttttctgaactacaatctatcggtacacaacagtagcttagtaaagggaaccttatttattattattattattatactttaagttctagggtacatgtgatcaacgtgcaggtttgttacttatgtatacatgtgccatgttggtgtgctgcacccattaactcatcatttacattaggtgtactcctaatgctatccctcccccctcccccaaccccataacaggccccagtgtgtgatgttccccaccctgtgtccaagtgttctcattgttcaattcccacctatgagtgagaacatgcagtgtttggttttctgtccttgcgatagtttgctcagaatgatggtttccagcttcatccatgtccctacaaagggcatgaactcatcctttttaatgactgcatagtattccatggtgtatatgtgccacattttcttaatccagtctatcattgatggacatttgggttggttccaagtctttgctattgtgaatagtgccgcaataaacatacgtgtgcatgtctctttatagcagcatgatttataatcctttgggtatatacccagtaacgggatggctgggtcaaatggtatttctggttctagatccttgaggaatcgccacactgtcttccacaatggttgaactagtttacagtcccaccaacagtgtaaaactgttcctatttctccacatcctctccagcacctgttgtttcccgacttttaatgatcaccattctaactggtgtgagatggtatctcattgtggttttgatttgcatttctctgatggccagtgacgatgagcattttttcatgtgtccgttggctgcataaatgtcttcttttgagaagtatctgttcatatcctttgcccactttttgatgaggttgtttgattttttcttgtaaatttgtttaagttctttgtagattctggatattagccctttgtcagatgggtagattgtaaaaattttctcccattctgtaggttgcctgttcactctcatgatagtttttttgctgtgcggaagctctttagtttaattagatcccatttgtcaattttggcttttgttgccattgcttttggtgttttagtcatgaagtccttgcccatgcctgtgtcctgaatggtattgcctaggttttcttctagggtttttatggttttaggtctaacatttaagtctttaatccatcttgaattaatttttgtataaggtgtaaggaagggatccagtttcagctttctccatatggctagccagttttcccagcaccatttattaaatagggaaccctttccccatttcttgtgtttgtcaggtttgtcaaataccagatggttgtagatgtgtggtattatttctgaggactctgttctgttccattggtctatgtctctgttttggtaccagtaccatgctgttttggttactgtagccttgtagtatagtttgaagtcaggtagcgtgatgcctccagctttgttcttttggcttaggtttgtcttggcaatgtgggctcttttttggttccataggaactttaaagtagttttttccaattctgtgaagaaagtcattggtagcttgatggggatggcattgaatctataaattaccttgggcagtatggccactttcacgatattgattcttcctattcatgaacacagaatgtccttccatttgtttgtgtcctcttttatttccttgagcagtggtttgtagttctccttgaagaggtccttcacatcccttgtaagttgaattcctacgtattttattctctttgaagcaattgtgaataggagttcactcatgatttggctctctgtttgtctgttattggtgtatgggaatacttgtgatttttgcacattgattttgtatcctgagattttgctgaagttgcttatcagtttaaggagagtttgggctgagacaatggggttttctaaatatacaatcatgtcgtctgcaaacagggacaatttracktcctcttttcctaattgaataccctttatttctttctcctgcctgattgccctggccagaacttccaacactatgttgaataggagtggtgagagagggcatccctgtcttgtgccagttttcaaagggaatgcttccagtttttgtccattcagtatggtactggctgtgggtttgtcataaatagctgtcattattttgagatacgtcccatcaatacctagtttattaagagtttttagcatgaagggctgttggattttgtcaaaggccttttctgcatctattgagataatcgtgtggtttttgtctttggttctgtttatatgctggattacatttattgatttgcatatattgaaccagccttgtatcccagggataaagctgacttgattgtagtggataagctttttgatgtgctgctggattcggtttgccagtattttattgaggatttttgcatcaatgttcatcagggatattggtctaaaattctctttttttgttgtgtctctgccagcctttggtatcaggatggtgctggcctcataaaatgaattaaggaggattccctctttttctatggattggaatagtttcagaaggaatggtaccagctcctctttgtacctctggtagaattcggctgtgaatctgtctggtcctgtactttttttggttggtaggctattaattattgcctcaatttcagagcctgttattggtctattcagagattcaacttcttcctggtttagtcttgggagggtgtatgtgtccagaaatttatccatttcttctagattttctagtttatttgtgtagaggtgtttatagtattctctgatggtagtttgtatttctgtgggatcggtggtgatatcccctttatcattttttattacgtctgtttgattcttctctcttttcttctttattagtcttgctagcagtctatcaattttgttgatcttttcaaaacagcttctggattcattgattttttgaagggttttttgtgtctctatttccttcagttctgctctgatcttagttatttctcgccttctgctagcttttgaatatgtttgctcttgcttctctagttcttttaattgtgatgttagggtgtcaattttatatctttcctactttctcttgtgggcatttagtgctataagtttccctctacacactgctttaaatgtgtcccagagattctggtatgttgtctttgttctcattggtttcaaagaacatctttatttctgccttcatttcgttatgtaccagtagtcattcaggagcaggttgttcagtttccatgtagttgagcagttttgagtgagtttcttaatcctgagttctagtttgattgcactgtggtctgagagacagtttgttataatttctgttcttttacacttgctgaggagtgctttacttccaactatgtggtcagttttggaataagtgtgatgtggtgctgagaagaatgtttattctgttgattggggtggagagttctgtagatgtctattaggtctgcttggtgcagagctgagttcagttcctgggtatccttgttaactttctgttttgttgatctgtctaatgttgacagtggggtgttaaagtctcccattattattgtgtgggagtctaagtctctttgtaggtctctaaggacttgctttatgaatctgggtgctcctgtattgggtgcacatatatttaggatagttagctcttcttattgaattgatccctttaccattttgtaatggccttctttgtctctttttatctttcttggtttaaagtctgttttatcagagactaggattgcaacccctgctttttttttgttttccatttgcttggtagatcttccttcatccctttattttgagcctatgtgtgtctctgcacgtgagatgggtctcctgaatacagcacactgatgggtcttgactctttatccaatttgccagtctgtgtcttttaattggagcatttagctcatttacacttaaggttaatattgttatgtgtgaatttgatcctgtcattatgatgttagctggttatttttctcgttagttgatgcagtttcttcctagccacgatggtctttacaatttggcatgtttttgcagtggctggtaccagttgttcctttccatgtttagtgcttccttcaggagctcttgtaaggcaggcctggtggtgacaaaatctctcagcatttgcttgtctttaaaggattttgtttctccttcacttacgaagcttagtttggctggatatgaaattctgggttgaaaattcttttctttaagaatgttgaatattggctcccaccctcttctggcttgtagagtttctgccgagagatccgctgttagtctgataggcttccctttgtgggtaacccgacctttctctctggctgcccttaacattttttccttcatttccaactttggtgaatctgacaattatgtgtcttggagttgttcttctcgaggagtatctttgtggcattctctgtatttcctgaatctgaatgttggcctgccttgctagattggggaagttctcctggataatatcctgaagagtgttttccaacttggttccattctcccagtcactttcaggtacaccaatcagatgcagatttagtcttttcacatagtcccatatttcttggaggctttgttcatttcttattactcttttttctctaaacttctcttctcgcttcatttcattcatttgatcttcaatcactgataccctttcttccacttgatcaaatcagctactgaagcttgtgcatgcgtcatgtaattctcgtgccgtggttttcagctccatcaggtcatttaaggtcttctctacgctgtttattctagttagccattcgtctaatcttttttcaaggtttttaacttctttgcgatgggttcgaacatcctcctttagctcggagaagtttgttattaccgatcatccgaggcctacggctgtcaactcatcaaagtccttctctgtccagctttgttccattgctggcgaggagctgcgttcctttggaggagaagaggcactctgagttttagaattttcagcttttctgctctggtttctccgcatctttgtggttttatctgcctttggtctttgatgatggtgacctacaaatggggttttggtgtggatgtcctttctgtttgttagttttccttctaacagtcaggaccctcagctgcaggtctgttggaatttgctggaggtccactccagaccctgtttgcctgagtatcaccagcagaggcttcagaacagcaaatattgcagaacggcaaatgttgctgcctgatcctttctctggaaacttcgtctcagaggggtatctggctgtatgaggtgtcattcggcccctcctgggagttgtctcccagttaggctactcgggggtcagggacccacttgaggaggcagtctgtccgttgtcagatctcatactctgtgctgggagaaccactactctcttcaaagctgtcagacagggatgtttaagtctgcagaagtttctgctgccttttgttcagctatgccctgcccccagaggtggcgtctatagaggcaggcaggcctccttgagctgcaatgggctccacccagttcaagcttcccggctgctttgtttacctactcaagcctcagcaatggtggatgcccctcccccacccttgctgctgccttgcagttcaatcttggactgctgtgctagcagtgagcgaggctccgtgggcgtgggaccctccaagccaggtgtgggatataatctcctagtgtgccatttgctaagaccattggaaaagtgcagtattagagtgggagtgtcctgattttccaggtaccatctgtcacggcttcccttggctaggaaagggaattccccgwccccttgcccttcctgggtgaggcgatgcccagccctgcttctgctcacactccgtgggctgcacycactgtccaataagcccgagtgagatgaacccggtgcctcagttggaaatacagaaatcacctgtcttctgcgtcgctgacgctgggagctgtagactggagctgttcctattcggccatcttggaaccaagatcaagggaacttcatttttcatccacaaaacttttttgctgagagatcaaaatattttgagtatttcatgcagcagatctaggggaaaatggcaaattaaacacagttggccccgttgtgtctgttttctgtcctctctctctctcttttttttttttttgagacagagtctcgctctgtttcccaggctgcagtgcagtggcacggtctcggctcactgcaacctctgcctcccggattcaggtgattctcctgcctcagcctcctgagtgtctgggattacaggtgcttgctaccacacccagctaattttttgtatttttagtagagacagggtttgagaatgttgaccaggttggtcttgaacccctgacctcgtgatctgcctgcctcagtctcccaaagtgctgggattacaggcatgagccactgcacccggcctctcttctctttgatctgtctgtctgtctacctatcatctagtcattctgaagcagaggcaggcaatggaggtgtagttcaaaaatgattttaaaattataattttttacaaccatgtatttctcctgcaaattaagatctgcctgttattatctccaagacagatgccagacttaaacgctcattttgctttaatttgggccaaccattttttttttttttttttttttgctctcattaaaatgtgtatggcatctaggagcatcttttaaataatctggtaaatacccttcaaagtgaagtggtaaaagaatggtgttttaatgggcatgatttaagctaagtgcatatgtatgaaactaattaaagcatttaatgatctgtagaagccttctgaatggtgaaatagccaaacctaaggaatggggagtgggtggaagtgggtactttgccattttttcttttagataactgcaattcgaagacagttgtttatgcttcatattccttggcaaaaatgtttttgagaggaaatatgataatgataaaatgaaacagcactttctgctaatgacctaatacttcaacccaggctcacttcatcagaatcacttacggagtttcagagccacaggtggctgggttccagcccggagatgtctactcagactgtgttgtcattgttgttgttttaatctgcattttaaaaaattccgtaggtgattttaaaatataagaaaaatatttttattaaagaaggggacagtggtttaatcttcttatagaagcttttttggaagtatacattacaggaaggtatacaaattatatgactcagtacattttctcaaagtaaacacacccatgtaactggcacctggaacaagaaataaaacatgatcagggccacataagtttcccatcctgccttcttgtactgctacccaacccccacacaatcacataactactttcttgacttctacaccctagattagtctttgaacttctttatatagatggaagcatgtggtatatacccatttgagtctggctgcttcttcttttttttttttttttttttttttaacgttttgttttgttgtcgttgttgagacagagtcttgctctgtcacccaggctgaattgcagtggcgcaatctcacctcactgcaacctccaccttcctggttcaagcaattctcatgcctcccgagtagctgggattacaggcattcaccagtaaacctggctaatttttgtattcttagtggagatggggtttcgccttgttggccaggctggtctcgaactcctggcctcgggtgatttgcctgcctcggccttccaaagtgctgggattacacacatgagccactgtgcccagtcctgagtctggcttcttttgatcatcattacrtttgtaagaatcatccttgtaatttggtcatttttattgctgaataatattccattttactaatataccataattgatccattcgattgtgtatgggcatttgagttgttttcagattggtgatttaaatggtgctgctatgtacattcttgtacatgtcccttttggtaaaatatgtatgcatttatttggctatatattcatttttggttatctattgctacctaataaactacccccacatttagtgacttaaaaacaacagccatgttattgcatgtaattctgtgggtcaggcatttgaacagggcttgctgggaacaacttacctctgttccatgtgttatcagttgagctcactcatctagctggactgggcaggaaagatcaaatggttttaatcacatgtctgggattttggtattaggtattaacttggttacctcttggccaggtgcagtaactcatgcctgtaatctcagcactttgggaggctgaggtggatggatcacttgagatcaggagttcaagaccagcctggccaaccccatctctagtaaaaatacaaaaattagctgggtgtgttggtgcacgcctgtaatcccatctactcaggagactgaggcacaagaatcgcttgaacctgggaggcggaggttgcagtgagccaaaatcgtgctactgcmctccagcctgggtgacatagtgagactccatctcagaaaaaaaaaaaaaaatttggttacctctctttttctcacgcagcctttctgtccattaggctattctggacttctttacatgatggctgggtccaagagggcaaaggcagaagctgccaggcctcttaaggcctatgtgctagaactctgggaaatcagttctgccatactctatcggttaaaacaagtcacaaggccagacgtgaattcagagcagttaaagagatatccatctcttcctcagaggagtggcagtattacagtataaagggatgtggacatagggaggcatgattccttggggagccattatcataaaaatgtaccacaagccagggatagaagtttggggttatagcgcttatatctgttcagctttattagatactggcagacatttttacaggatggttgtaacaagctatactctcaccagttcagttgctccatatcctcaccaacacttgcaatagtacattcatttcattttagtcattctggtgaatatctagtggtatcgtatttcaggtttaatttgcatttccctttgagcagtcaagttgctcactttttttcttttcttttttctctttttcttttttttttttttttttttgagacagagtcttactctgttccccaggctggagtgcagtagcgtaatctcggctcactgcaacctctgcctcccgggttcaagccattctcctgcctcagcttcctgagtagctgggactacaggcatgtgccaccacgcctggctaatttttgcatttttagtagaaatgggtttcgccacattggccaggctggtctcaaactcctgacctcaggtgatccgcccacctcggcctcccaaagtgctgggattacaggcatgagccaccgctcccgaccaagttgctcacctttttgtatgtttattggtcatgtggacatctcatgtggtgaagttcctgttcaggtttttttgtccatttttctattgggttatttgtctttttcttatgaatttggaagagttttctaactcttcttattttattttatttttttagatagagtctcactctgtcgcccaggctggagtgcagtggcatgacctcggctccctgcaacctccccgctgcccaggttcaagtgattctcgtgcctcaggctcccgagtagctgggattacaggcatgcaccaccatgcctggctaattttgtatttttagtagatacggggtttcttccatgctggtcaggctggtctcaaactcccgacctcaggtgatccaccckcctcggcctcccaaagtgctgggattacaggcgtgagccattgcgcccggcctaaataggawatttttaggaaccagaaggttatttaacatttccagatatcggggccaccagattaatggtcttaactctggggcatggagtatcttgagacacgttgggtactctgaagataagaggtgaccctggaagcagtcatacttgtccttgtaatcctaccacctcttgatgatcaattataacagttgatctccctgtgctactactttaagagctcaaaaccagtgcataggactccatggggtgtagagactccacagaaacattcccagtccacttttcacacatcagcctcctcccacaggcagaaagccgaagctgccatacatagccataggtttaaacagagactggcggaagcggggagtgggatggagtgtgtggaagtgttgttttcacttttctttctgcttctcagatcagccaaaatgtcctatcggaccaggtattttatattttttgttgctatggtgaatagaacattttccccattatatcttccattggttatcggtagtgtttagtaaagcttttgaattatgtcaatttatcttatattgtgctactattaagtaataataatatttttattgttgatatttgttacatgtttaccatgtgccatgtatttaagtgctttaaatacatcatttcatttagtcttcatgacaaaccagtgagattagtagtattatcatcccctttttgtagatatggaatctgaggcttagaaggcaatctcccaaggttattcatctcattggtggagaagctgtgattcaaaccagtgtgattaatgtctatattttatacatataaaaaatataaaatatatatttattatagtatttatataatatatattccatataattatatatttatatggaatatatattatatattatataattatattatatatattatataattatattatatatattatatattataatataattatatattatattatattccatataattatatagaatatatattatatatatatatatttattttcgagacagggtctcactctgtcacccagactagagcacagtaacatgatcatggctcactgcagcctcgacctcctgggctcagatgatcctcctacctcagsctcccgagtagctgggactagaggcacgcaccaccatgcccagctaatttttttgcattttttgtaggggttttgccatgttgcccaggcttgtctcgaactcctggactcaagcaattctccatgcccagcctctgtattacatttaattctcctatcaattctgggagtttttcaattgattttcttgggtgtaggtatttaatcacattggccacaagtaactttatttttatatctttctatacaataattactgctcttatttcagcttcatgtcttattgcattggccaaagatagtggatcagtgttagaatgaaacagtgaaagtgggcatccttgttttgttgatgatttaatggaaaaaccattattgattatttaaatttataaagcgatgttaaggaagtatcattccattcctagtttctgagtttttaaaaaatcaggaacagatgttaaattttatgaaatgtcattttggcatctattgaatttattatatggacaccaatggttctgatccagattcataactgagaaacaaaaataactataaatgtagttcaattgttgcttttctttttccagcaatatctggagcttgttttcaaagtgacatgtgggtggtagaggcagaaattgttgtataaaaatttatgggctttaaatttttccctgtccagattttgagtctgtactgggtaaaagaaaagattgtgtgtagggggtatttttgaggtattttctttagaacaacttgtaaaggtatcatttgcctataattcttaattagtttagattcatgttgacaaaattgtaaaccaaataggtaaggattaattctgtgttgcacaaatctttatatattgttcattaaattattgttattagttataatagttctagcccacaagaacagtatatacataagaaatgttaaagcctttgattgttttcatacatgacacattagctactggaagagaatttatgttattcttttttatgttgctaaaaaccagcagaaggattatgatttgacgttgactaatacttcatattgagtagttttaactaagaatcggtttagggaactggtgctttttcatatctttgtcactgaacttttaggcaatgatggtcatcagatctatggaagggacggtagaccaagcttctcttttttttaaagaatgaaaacaatattttaattttgttcttaagtaacaagactgagtcttcataactggaagggatggaactgatttgctgtgtcagttagccgatgggaaagggagagatgacagcatgggtggaggcagtgattgggaaaataaaatgatttttgctttattgctcacagagttggggttactaaataaatcggttataagtatataaataatactgtaggtatcgtgtagcatagttacattttaatatgcagtaaaagtgtaatggttaagagtttgagctcaaagccagattctctgggatcaagttccatctctgctacttacatgctgtaccccattttccttgtatataaaatggagataccaacaatatttatctcatagggtggtttcggtcattacatgaatacacatgtgtaaggtgcttagaacagtgcctggcacatcagtaactgggagctcccatccttgtcattatcaccatgatgccttggaaaaggtgtggcctggggttcaactgggcaggggttgctgagttttgaaggatgataaattgtccaaagaagagaaagcaagggtagtccagggagagggaagagtgggaacaataaagacagagtgctgggctgggagaggaaagcatcgccagtgtggggsagatgcaaggtcccggggtgacatcttagatcggaggagtgtctaactatgtttaattgtgttacagagtctgaagagaggatcatgctggagatacaggcaagggaggaagtgactatgaagttgccaggcctctgaggatttggaagggagaaagggtgtggggaacagctccatgggtggttccatatgcctgtctgcatccatagctgcatcctcaacttcatttcctctttccttccagcatctgactttctaaatcaggcatgctttaagctatgctgcctttctttctttctttttgagacagggtcttgctgtgttgcctaggctggagtgcagtggcacaatcacacctcactgcagccttgacctcctgggctcatcctcctgcctcagcctcctgagtagctgggattataggcgcacgccactatgcccagctagtttttttgtattttttgtagagacgaggtttcaccatgttgcccaggctgtttcactgcctttctcatgaacactgcaatcatatcataaattcctcccccatctaaaaaacagaatcccctagtttttaccatgcgttccatattcactttattttttagagtctataacagaaaataacctttataattctgttagatgatatagtgaaagtactgcgggtttttgtgggtttttgtttttgctgttatttgttttttctaagagttgcttggtatttcagtgtgtacagtcaggaaaaggaaagttttcatttgaagcaagatttatatccaagaacgactaccaaattgaaaagggtggcatgggcattgaagacagtgaagtatttaggctttactgcctacgtaatgaatctgagataaagttgtcaagatgctctccctttctagtctctaaatataaattgaaataattaagttattcttaaatctcaaaccaaacccaaatgagaaaaataaccactcccggaccacattaaagacagacattattactcctaaattcagcttcttataaaacatcatcaaccaccaccagaaaacactgtggtacacaagaatttagaaaatatttttttaaattgccaaatagtatgactttagaaaacatttttcacgtttagttcttaactgtaatctctcagcataactggatcatgaaaaaaatgtattctgtctatatcttgaccactctgaatattttaaaagatagaaactgtttgcagagaacttctgaagaatggcctttgtaacaattcggtgttaatgagttgaagagtatgtcattgtcctctgggtcattatccgcaagaatattgtgtattaaacaaccaccatacctcagtggcatgtaatcaatatttctttttgctaacaagtctacagattagctgaacacttctgctgatcttggcaggtttgattaggcagtttttttgggtcttggctggagttcactcatgtgtccagaacaaacactggtggctgctggctgggggctgatcgaggacaaccttggctaggatgactcagctcagctctacatggtcttgggtctttctgaagcctagcctaggctttgtggtagtggcattgttcctaaagagtgcatgaaagcatacaaggcctccagagagacctgagcttggaactggtacatagcacttccatcacattctttaggccagtacaagtcatgagcccagcctggtttgaagggatggggaaacacactcttgacgggagtagctgcaaaagtacattacaaagagcatggatagaaggtgggatagagaattgggatcacttttgcaatccatctaccatgtttcctttcgtctttctctgtctgaattgtcttgatttctgtactggggctgactgtttcatgggcaatctagcaggcagggaccctgggtctcagcacccactaaaatggacaatgcaggcactccgttatgtagaactgtctctccgagactgagaggttctttgggtatttctgcctgtgatttgtcctttaactttatctgctttgttaccaagaaagaatgaaaatcatgtcagaaagtttatttttawgtaaagagaaaaacaaatccgttacagctaaatagaatcctctgaagtgtttaacaggggaaaaattgaatgttgcagttaaattttctgtaggttctgaatagcagcagatgtttgaaccaaatataatgtattgttctgttttcagccctatttgtaaaagtctgagatgtaagagtgggcaaaaaacttagagctagagcttcgatcatccaaataccttgattggctagttttccctgtgcttctccctccccttcccactagccatggacccactgctgtggtaaaacatctgcccaggaagggatggtggtgacccatgtgaatgttctggtctcagggtcagtcattcctcgtggttatatgtgggctgtgttgatatgcagaacatttagcacagtgccttacatgggctaggtattcaagaagatatttattaaatttaagtattgaaatgttgattcccacccccacccccacccccccgttctgtccttccttttccagaattaagaaatcagtctcttgaaagcgaacaggacatgagggatagatgggattatgtggactcgatagatgtcccagactcctataatggtcctcggctacaatttcctctcacttgtacggatattgatttacttcttgaggccttcaaggaacaacaggtaagtggaagcagatgctgccttgattcttgtacataacagatgcccaataactgttgaaagaatggatgaacataccacagcagagatgcatttctttagaaaacagttcacattaagtgagagctcccctctgttactcatttaatagaagtctcctcaggtgcacagcaagctcctctctgtaggctaacagcatttcatttgccattttctgagatatcattcacataccataaaagtcaccattttacagtgtacgactcagtgactttttcacgcattcacaggattgtgcaaccatcaccaatatctcattccagaacattttcatcactcccaatagaaaggccattcctgttatcattgcctcctccccacccctggcaaccactgttctattttctgtctctatggatttgcctattctagatatttcatgtaaatgaaatcatcaaatatatggccttttgtgtttggcttctttctcttagtgttttaaaggttcgttcatgtcatatcatatatcattacttgatttctttttatggctgataatattccattgtataccacattttgtttatccattcatcagtgaatggacatttggatcatttccaccttttggctattgtgaacagtgctgctatgaatattcattcacagattttcatataaacatgtgttctcagttctcttgggcttatacttaagaatatttcactgggtcatatggtagctctatgctggatcatgtggtaactctatatttaaattttccagtaattactaaactgcttcccacagtagtggcaccattttgcatttctaccagcaatctatcttcccatgtaggttccaatttcttcatgtttttgccaacacttgttattttgtttttttttttatttttattatagccatcctagtgtgtgtgacgtggcatttcattgtggttttgttttgcatttccctaatgactaatgatgttgagcatctttttatgtatttattggccatttgtataccttctttgcagaaatctgtgcagattctttgcccacttaaaatcaggctttttattattgagttataagagttctttctggatataaattccgtatcagatatatgatttgcaaatattttctcccgttctgtaggttgttttttcattttcttgataatgtactttgatgcataaaagcgttacattttgataaagtccagtttatccatgttttttcttggttgcttgtgcttttggtgtcttggttgcttgtgcttttggtgtcatatctaagaatccattgtcaaatctaaggtcatgaagacttgcctttgtgttttcttctaagagttttatagttttagcctttacacttatgtctgtgaatgattttgagttagtttctatatatggtatgaagtcaaaattaattttttgcatatggatatgcattgtcccagcaccatctgttgaagagactgttctttccccattgagtggtctttgcacccttgtcaaaaatcaataggccaggccgggcacagtggctcatgcttgtaatcccaacattttgggaggccgaggcgggtgcatcacctgaggtcaggagttcaagagtagcctggccaacatgatgaaaccctgtctctactaaaaatacaaaaattagccaggcatggtggctcatgcctgtaatcccagctactcaggtggctgaggctgaagaattgcttgaacccaaaaggtggaggttgcggtgagccgagatcgtgccactgcaccctagcctgggcgagaaagcgagactccatctcaaaaaaacaaacaaataaaaatctataggccatagatatctgggtttgttattggactctcagttctattctattggtctatgtgtctgtgccagtaccacactgtcttgattgctgtagctttgtagtaagttttgaaatagggaagtgtgagtccttcaactttgttcttttgcagtgttgaarttgttcttcattattgttttggctatttggggtcccttgcaatgaatttgaagatcaaattttccatttctgcaaaaaagcctattgggattttgatagggattgcgttgaattgctatatcactttgggtaataattgccatcctcacaatacaagtctttcaacccatggtgtctttccatttatttatgtctttaatttctttcagcaatgttttgtagcttttagtggacaagtctttcatcaccttggttaaatttattcttaaacaatttattcttttggttgatattataaaaggaattgttttcttaattccttttttgattgctcattacttgtgtgttgatcttatactctgcagctttgatgaatatacttgttagctctagtagtttgtgtgtgtgtgtgtgtgtatgtgtgcgtgtgtggtgtattcttttgaatattctatataccagatcatggtatctgtgaatatagttttatttccttctttctgatttgggtgccttttgtttctttttcttgctcaattgctctggctagaacttccaccacaatattgaatagcagtgtgaaagtaggcatgtttatcttgttcctcatcgtagggggaaagctttcaatctttcactactgagtttaatgttagttgtaggtttttcataaaagtcttttatcatgttgaggaaatttccttcaattcttagttttctgagtggttttatcaggaaaagttgtcgggttttgtcaaatgcttttttttttttttacatcagttgagatgattgtgcgttttttacccttcgttctattaatgtggtgtgatatattgaataattttcttatgttgaaccaactttgtatttctgggataaatccctcttggccatggtatataatccctttaaaatgctgttgtatttggtttgctggtattatgttgagaatttttgcatctatttcataagggatattggtctgtaattttcttttcttgtagtgtctttgcctggctttggtatcagggtaatactgatctcatagagtgagttaggaattgcttccttttattctgttttttggaagagtttaagaaggattgtgttaattctaatttaaatgtttagtagagttcaccattgaagccatttggccttggacttttctttgttaggaggtttttgatgactgatccaatctcttgttctagatctgttcagattttttatttcttcttgagtctgttttggtaatttgtgagtttctaagaatttgttcatctcatctaagttatctaatttgttggtgtacaattgttcatagtattctctcataacccttctttatttctttaaggttgatggtaatgtccccactttagtttctgattttagttattttcattttctctttttttcttagtcagtcttgcttaaaggtttgttaattttgttgatcttttcaaagaaccaacttttggttttgttgattctctctattgtttttctattctttatttcatttatctccactctaattcgtattttctttgtcaaaatattaagttagtttattgatttgagatccttcttttttaatgtgtgcatttacagctacaaatttctctctgaacactgcttttgctgtatcccataagttttgatatgttgtgttttcatttttattcttctcaaagtattttctaatttcctttgtgatctttttattacccattggttttttaagagtatgttgtgtaatttctacatatttatgaattttctagttttgcttttgttattgatgtctagtttcattccattgtggtcaaagaagatactttgcatgatttcagtctttttaaattcgatgcggtttattctgtggcctaacatctggtctatcctggagaatgttccatgtgtccttgagaacaatgtatagtctgcttttgttggggagagtgtttagtagatatctattaggtctagttgtgtgtggtctctgaaatctctgttcctttagcttgtgttaagttagtgttttgacagagacttccttgaacaccaggagcgatttaaaaaaaaaaaaaaggaagggaaaaaaaccaacaacaaatatttgcagattggctctctgttggagcactccttcaactccttgggccatttacaaatgttagtctttacttcccgcttgtgctgaaccattgttcagtttcctttttcttgattcactgtttggttgctataaactttgagtattttccagagttctgacaaagttgattctgacagggtttgtttgtttgtttgtttttgcttgatttgtcaatgtttttgtggcggaatgggaccttaaagttgcctacatgaccgttttctctgacatcaccccagtaccctcattctcaggttaggaccctaaagggcatacctaggagtaagagtgaactggaagactggcttttcaatgatcagagaacagcttggaatgaatcatgtaattcctgagattgaactgagatcatcttagatagctaaggctcctaaccacctgccaacagcaaatttaagtcttctctggaagacaataggcctgagattgtttgttcagtttttctttcttcctttcttttttaaaggcagggtcacactctgtcacccatgctggagtgtggtggcactatcatagctcactgaagccttgacctcctgggctcaagcaatcctcccccctcagcctctcaagtagctgggactgtaggcacatgccatcatgcccagttaattttttattagcttttggtagagacaagttttcactgtgttgcccaggctggtctcgaactcctggcctcaagtgatcctcccacttcggcttcccaaagtgctgggattataggcatgagccactgcacctggcctcagtttttcatatgcaatttccagaactcaatacaaatataaccaagcacaggaggttataagacacatgaagaaaactgaggcaaacaacaatggaaacagacctgtagggtatttggttagtggcattatcagactctgagtttaaaataaatatgcttaatataagttcaaggagataaatcaatccaaggagccataatagagaagattgataattctgactttataaaaatgaaaagactgttattaagggaagaataaaaggttcaacacagtgtacagagtaaaaaaaaaaggatcatgtatattttgatttttttaattgagaaaaaattcatctaatgtaaaagtgatcatttaaatcattttaaagtgtatgaggccgggtgcagtggctcacgcctgtaatcccagcactttgggaggccgaggcaggcaaatcacttgaggtcaggcgttcaagaccagcctggtcaacatggtgaaaccccgtctctactaaaaatacaaaaatcagctgggcatggtggcacgtgcctgtagtccccgctactcgggaggctgaggcacgataatcacttgaacccaggaggcagaggttacagtgagccgagatcgtgccaccgcactccagcctgggcgacagagtgagactccatcccccccagcccccaaaaaaagagtgtatggttcaacagtttttagtatattaaaaatgttgtgcaaccatcaccactatgtaattccagaacattttcatcacccccaaacaaaaccctttacccattagcagtcactcccagttgctccctcccccagcccctggcaatactaatttaccttctttctctatggatttgtctaatatgaacacttcctgtaagtggaatcgtacaatatatgtggccttttgtgcctggcgtctgttgcttggcatgtttccagagtccatccgtggtagcatggatcagtacttccttcctatttttagctgagtaatgttactttgtatggatatagcacattgtatttaagggattatatgtttatacatgcatttttgtrttcatctgtggttatattgatttttgtatgcttgcaaacacatagaatatttctgggaaagatacgatacttttaacagtggctgtttctaggggtagggattaggggaataagatctaggggagacggaaaatgacttttcattattttacccatttctactatttaaaattttatttcaactaaaaaaatgacgtgtttctccattttaatactacttttttttttgagatagagtctcgctctgttgcccaggctggagtgcaatggcgcaatcttggctcactgcaacctccgcctcccgggttcaagtgattctcctgcctcagcctcctgagtagctgggactacaggcgcgccccaccatgcctggctaatttttatatttttaacagagatggggtttcaccatgttagccaggctggtctcgaacttctgacctcaagtgatctgcccacctcggccttccaaagtgctaggattacaggtgtgagccactgtgcccggccctaaaactacttttttaaaaagaaatattctttaaaggtagtattttcctctaacttaaaagaatgtgactattttattcaagtggttatttaacctgaatatatttataaatggagaaactgccatctgagttaatcatcttgagcatttaatattgcagttgtaaatataattctaatgctatggaaagatagccttataggcaaggactagtatgaccaaaatgattttagtcaatccaaagacccagagaaattattttcataataattttctgttgttgcaatatattctcagtgaatatttgttaatttagcttttataaaaaagaaaacttcccctttagacaacagttactctgataagtactaccaatggaccagaaaaactacaatgataagctaaggtaacactgaagccagtgttgggaatcaatagattacatgtggctgggggtggtggctcacacctataatcccaacactttgggaggctgaggcaggaggatcatttgagaccaggagttcgagaccagcctgggcaacctaatgagaccctatctcttccccaccacaaaaaaggaaagagcttgaaaatccagtgtgaatttttcacttacagcacatttcaattcagattagctccatttcacatgctcagtagctccatgtggctagtggctgccatattggacagcataggtccaatatggcaataggtctaaatagttttgacctattaaaatatgttaaatttgtgtggtagtcacatctctgctgtattatattttggagtatgtatttataattttttttcattctccctctcctttttctttttctcttttattattacaattggctttttgtctgcacgtttccctagggcaagggcgtgcctcccttcacttctcttgggctctaaggacctgggatgatgattcattttctcagttacacacgtcgactgagggcttattatatgccagacactgggctagaatgatctatttcagaataattgaaaggttatcctgaaatacagcgacctgaaacgtgcgtgcttgctccacctttacagttttctatacagtcatgtctttcttccttgttcattacatctatttcctctgcttcccgctcacagatacttcatgcccattatgtcttagaggtgctatttgaaaccaagaaagtcctgaagcaaatgccgaatttyactcacatacaaacttctccctccaaagaggtaacaatctgtggtaagtttcagagcagagttgtccaattaatatttaggagcctcttggtcctacatcgtttgcctaacttgaaaactgtgtaaattggactgtgttaagggaaaaatgttaatatagaattatctatcatgataatactgttccccatcttgtctttgttttgcataccagctggcaggaattaattatgtgagaaattaaagagctcatagctttttataaaggcagacagcattttaatatggaaaaaccacccatgggtggaataagcattctttgccctccgtctagctctcattatctttgttccacgttgctttttctaggtgggcctctgcatgccacttgtgctgggaagagaaaagcccgtggcggggtgaagattaaattcttctctgcccttggctgctgttttagatttttccaactggtctgtgcagcttttagaagagtgggaatgtcccagaaatctgtttcttgttcttttaaataacaagatttgagattttgctatcatataggccagcctggcaggatattgcttcaagaaacagtacacattgaaattcctcacagttggtgctcagcatgcttgcaaccgtttgacagtggggtgcgtggaaggaacagcaattcccttaacttctaattaagcctttaggttacaaaacagtgattgttattttccaaatcagtttttagcctgcatttctcttattctggcaggtagaagtgaatttgacaatctaattaaactatttgcatttctagcgtctgatagtggtggcagggacttgatgtagcagtgcctacctcatsacatgccctgactcaggtttttgaagagtctctaatggttcatttccagcctcatcaggcatcacgtctctgactggcagatgattcatctcagcagtgggggtcttttattcaaggcctcacctggccttttcatggaaaatagagacttcgggtcatgaggctcagaaagccatgccaccctgtgaagtctgtgaggccagggctaggtgtgctcttaggatatatagaatagcccaaactgagaatgggatccgctcccctgtgtttcactgggagccactacagactcatccttgctaaaaggatctggaagaagacacacgttaattacagggcagggcagtcctagaatcccacagtgtgagaactgaagggttctctagtctattccttgctcttatgggtgaaattgaagctcagagagaaaagtggcaggatcagaattaaaatcaggtcttctgtatcccaggttagaggcagccccacatctgccatcctgactcgcattaggtacctggtggttcattgtccatcgtgagacaaagattagggcgtgacttaactggacatctccattggttaaagatttccacatcttggcacttatttctagactttttcacgtggcaccattggtagggggaaaagacaaggccagtgggttttcttaacatgggaatattattattttctatttttaacagctcattgaacttcaaaaatttcatgattatttataataaaatttaaaattggggccataacttcaaaaccatcttccgtttaagayggtgttaggaaagggggagagattgtgatkaaaatttgctattattttaattgtgagatgcatttttttacatgtacatctaaatatgccccgtagttttcagcatgcatgaaatataagaggatttttagtctacagttatattataaatgataaccaattctgcactcatgtttttgttggcagtggaaatatctttctgtccttcttcccatggtacgagtttttctttcgctgtccaactagaagttaaaaatattaaactaagtaaagagtcctcccatctttatgtccttagatttagagtgagaccatatgaaagcaatgagatttaagcacacaatgatactaatatgctaataatattatagtagtattttataaataagtgctggtgatatagaatttctattttattatttccagtatatttggagtcttctattgcatgtatttggttaatcttggttgtgggattttaagcaaactgagggaaaagtattcgtaaattaaattgtatagtaattaagttggatacaaagaataaaaatttatgagcagaacttatgaaagatattttacctagaaatagttatccaaatggggcttttggatattcacatagtcactcattattattgctattttttgagacagagtctcgctctgtcacccaggctggagtgcagtggagtgatctcagctcactgcaacctctgcctcccggggctccagcgattctcctgcctcagcctcctgagtagctgggattacaggtgcacgccacgacacctggctaatttttgtatttttagtagagacagggtcttaccatgttggccaggctggccttgaactcctggcctcaagtgatccacctgcctcggcctcccaaagtgctgagattacaggcatgagccaccgtgcctggccttattttttaattaatggcttcagatactcatgatctcccctagttggctttcattttttttctatgtctcatcaaagaatgtcaactacctactcacaaagtttaaatttcagatgctgctactggagtatattaaaaacacggctttaaaaagctatatacttagccaagaaatgtatttactgagtgcctcttatccactgggtcctatggtaggcacttggggattcaatgctgactacaatagatactgttgctgctctcctagggattacagtgtgggtgtacagaataatcgctaagagcctgaggggttttttgtttttcgttttatttttgagacagggtctcactttgtcacccaggctggagtgtggtggcatgatcacagctcactgcagcctcgacttcccagggtcaagcaatcttcccacctcagtcagcctcctgagtagctaggatcacaggtgcgcaccaccaaacctggcaattttttttttttttttttttgagatggagtcttgctctgtcacccaggctggagtgcagtggtgcaatctcagctcactgcaacctccacctcccgggttcaagcgattcttatgcttcagcccccacaagtagctgggattacaggcgtgtgccaccatgcacagctaatttttgtatttttagtagagacggggtttcgccgtgttgaccaggctggtcttgaactcctgggcccaaatggtccatctgccttggcctcccaaagtgctggggtaacaggtgtgagccatcacacccagccaagcttgagttttgaagtgagttaaagttgggtttgaattcttgctctgatacttgatggctgggtatctttgcataacttacttaactactgtgagcctcatttgtaagatgagaatgatgaagataaaacccatctcatagagtggttgtaaggactgaactagataattcatgtaaaacccttagcacagtgcttggcccagagtgatcgaagccctgtgcaaatgactggactgaaaaggtaattgaagcactagatgctgtccccactataggagaggaagagaagagtgctgtggagacaaattgcctgtcaaattaacatcgtcataggataaaaacccaatgccctgagaacacttggagtggatcagcagtatttcacttttaaaaatgggcattgcatcttgttctctactgaatactgatttttcatttgcactgcaggtgatttgcatgggaaactggatgatctttttttgatcttctacaaggtaaatgatgattttgctaaatattarcatttttcttgggggagggcagtcttagggcagataacaatattagttttactagagatatgtactaatacagatataatgttactgtttttaaccaggaggctcaaagatttgtagagccatatctttttttttttttaacacacatctcataaatttttraaaaattgtactttgggtcttcattctacattattgttgtctgtgtatccattaggrtttgtaccggattgtatttattgtctttatcgcatcataaatgtctagatggtacaggatggggagggatgcagtctgttttattttaattttgttcagggatgagcatgtcacataccagtcttctcttccagtgcacactaattatgcatgagtggagttgcttatgataaggaataagttccagcatgctctcttttctcccctgattcgccatccatgggctcagttgttcttccartgctgtgcctcctcttcatttattgcatttggcttgtgagagccagcacagagggcacaagactgcttggccagcatggattttctctgcatctctttgattggatttttttctgtctctgggccaagagttacagcctgaatgtttgcttcagggatggctgactgcatatggaaaactgatcttgagatccctgccttcacagcggttacccctttacactggtcttctgaatgtctctttttgattaatgcatttattgttcatctactcctgtgacccccacaactagcatgtcaaataattgggcgtagcgtaggtatctcagatgggtggaaagaaaatatattctgattattattgttaccagaaaggggtcccgatccagaccccaagaaaggattcttggatctcgcacaagaaagaattcagggtgagtccatagactaaagtgaaagcaagtttattaagaaagtaaaagaataaaagaatggctactccatagacagagcatccccaagggctgctggttgcccatttttatggttatttcttgatgatatgctaaacaaggggtggactattcatgcctcccctttttagaccacatagggtaacttcctgaggttgccatggcatttgtaagctgtcatgatgctgatgggagtatagccgtgagaatgaccagaggtcactcttgttgccatctcggttttggtgggttttagctggcttctttactgcaactgttttattaggttgstgcaaaagtaattgcggtttctgcgtgctctggttcaaacacctctaacattattgttcctggaccaaactgagggttgggctgctatttctcatggcccaataacgagatacagatgaactgggaaggaagagagtttttatttctgtaagtggctccagggagaaggcctggaaattatcaccagaccaactcaaaattagaaagttttccagagcttatataccttctaagctatatgtctacgtgtaagtgtgcactcatctaaagacgtaagtgattaacttcttttcatctataactaaggtctgagtcctgaagaccttcctctggagcctcagtaaatttacttaatctaaatcggtccaggtgctggggtgattacccttatcttgtctcctgctaaatcatggaggtttgcagagttccttcagacccccaatcaacttgtttgtggaggcctggggagtttcttcacatccccagtaaaacttgtttaatcctaaataggtcctgttaagaattccttcgttatcttgccatgctttaacgcccaggaaaggcctagacaaaactcttggtgggcttttgttacattccagcctttgtatagggcactggctctttgagcttttaatatttaactgaaccactcagtcagtactgagacagttgttatggaggcctgcgttagtgagacctggcctgccacattttgatgaccaatcagttccactctttgaggctgtgagagcttgagtragccatacaacctccatgaactgcaattttttttttcagctgcaatattatcttgagcttccaccccataagaggttgtattctggataaaataagtatccaaaagcatttttaaaataataaattataatagaaacacaaggttttcacttcatgcattagattagcagcttggaagggaagaggacaggccaaaccaggagtgggtagagccagcacctaggaagaggttccgttgagacttcagcaggcccaagccaggacgtagagtgtgactgtcagagagtgtcaggaggtgtcccaagtagcagattggtgtaggaagtccaggygaaggtttgctggcagggagccgagggggctggtgaaagagcaattctggacatcagccacagaatctaagctgggtagggaaggaagagaagccaggatgggccagtcaactgggagaagtaggagggtagtaggactggaatgctgaccgactgtgtcagggagcaggctgactgcagtgarggccttaggaggtaggatggtgggaagtgcagggggagcagtcccagggcaagggatgccctggggtggagcctagaacatgggcagcccaagccatcgaaagagagtattggcgatgaggtgggcaaggacctggaaagcaggtgtgttcaacagtggggggcaccacgtggacccagatgaggagcaggggaaggaagtttagtcagaggtcatgggcctgaaaggagggtggtggggtgtttctctgtgagcagccctgggggcaagcagagcctcccctgctcctgggcctgaggtgggtgtcctggggatgggtgggtcctttccttcagaagggctgcaggagtcaggagtgctgctgtgctctggaggaagcccaggcctatggaggagagaagcctttctgaataagttgaaggtggaaggggcttcattgaccatgaaatggagattctactggccccactggagtgccatgggaaaggtggaaggatggacaggggatgggatttatttaayttgggacgtagctccacaccaaatgttcagaagtgcggtccggctattgttgacaattacaatgtgaggaaggaggagggggcagggcatgtggagaacaacaacaaacctggtcattctttatctagagtcttgagaaatatataaaagggmaaatagttgagtaaattaaatcgggaacgtagtcactaaattccaaggcatttagaaaagaaaatttctttatttcgtatraaagtgcgataagggataggactctggagtagacagatgagaaaagagaattctaacatatttctttaattctgtctgcaaaactatatggaacatataaaactggaaggtgctaatgtaaagattgaacaggaggaggtgggtggtaagaagtactataaaaggaactaaaggtgaaaatatagcattcaaatgcaagcaagatatatttggagagctaaccaatgacagtgctaaggaaatggagattgctagcccagtgatgaaagactagggcactattatatttaggatggatttgggtagagaggtgagagggatgtctggaaaacagaagtgtgcaagagccatggattagaattctggcaggcgtgagtgagaagaaggtaaaatgcatcttggacatggagtgaaccacatacaccagaatctcgaaactgcctggtttaagtggggaaaccgagggaagagccattgatgacagcaagtttccactttaagaaactgaaaagagatctagtgtacaacacgaggactataggtaataaaattgtaccatatatgggattcatgccaaatgagtagattttagctgctattgccacaaaaaaacaaaaattggataactatgtcagatgatggatactttaatttgcttcactatagtaacctttttactatatgtatgtattctgtaacatcatgatatattataccttgaatgtacatggtaaaatttattttttaaaaaagaagaaaatagcaacaatgataaagcaatggggaaaatagctgatcaataatatcattagtattttcaacagcggtacagcagaaaacccggaaactatattattattttaaaggaatttataataagtgaataaatacattactttcatttatctagaaaaaggaaaaaggccgggcacagtggctcatgcctgcaatcctagcacttcaggaggctgaggtggacggatcacttgaggtcaggagttcgagaccagcctggtcaacatgatgaaacccctgtctctaataaaaatacaaaaattagccagatgtggtggtgcgtgcctgtagtcccagctactcaggaggccgaggcaggagaatcgcttgaacccgggaggtggaggttgcaatgagccaagatcgcaccattgcacttcagcctgggggacaagagcaaaactctgtctcaaaaaaaaaaaaagaaagaaaaaagaaaaaagaaaaaaagaagctggaaaggtagtgtacttaatggtgtctcagacgggagaatgacacgtagagcttgggggtgatggtgcttggtcgcttagcttatagcaaaagaatgtcctaagttaaaagcagggaaatgaaaggctgggacacagagatatctgaggaagccccgaccatctgatgatctctgatttaccaaagtcaggattttgcccttttctgtcttatttatttttgtctgcagtttaactggagaatgatgatagtttgcatggatgtactgtggcctaaaagcatgaatacaggctgttctggaaacagtgtttctatataaatataaatgacagtgataccccacctatcccaatgtcaaacttcagcctactttacttaccttcacttaccactcatatgtcccaaacccagaattaagtaaaaagggtctctgaacgcttgaaattgttgacacaaatccaatgaaccctactcacaggacaggccttaggcctcttactcaaagacccatgaaccagtatcagtaaaaccttctctcacgcaaggttcacatgagtttgcctgtctggctacccaccccacagcagattagggagtgggaggtgaagatggaaaagtcagacataatgacagcaatgaaaattaaaacgttctggctgggcacggtggctcacgcctgtaatcccagcactttgagaggctgaggcgggtggatcacctgaggtcaagagttcgagaccagcccaaccaacatggtggaaccccattctctactaaatacaaaaaaaaattagcttcgcatggtggtgcatgcctgtaatcccagctacctgggaggctgaggcaggagagttacttgaacccgagaggcagaggttgcagtgagccaagattgtgccattgcactgcaccctgggcgacaagagcaaaactctgtctcagaaaaaaaaagaaaagaaaagaaaattaaaagacagaactataaaaatgagataaaaactgaaatactaatactcagcgatctggagctgtggagtgtagggaagagagttcttgccttgtcagaagtgcctgaggggatgtttagactgatgagcctgcaaggccaagagagtttcaagttataaggtgtatactcttaagaagtaaaggggaccaggcgcgtggctcatgcctctaatcccagcactttgggaggccgaggcaggtggatcatgaggtcaggagttcaagagcagcctggccaatatggtgaaaccctgtccctactaaaaatacaaaaattagctgggcgtggtggcacacacccgtagtcccagctactcaggaggctgaggcagaagaattgcttgaacccgggatgcagaggttgcagtgagccgagatcgtgccactgcactccagcctgggcaacagagcgagactccatctgaaaaaaataagaagaagtaaagggagcaaatggcacattttaaaaacttccagccaaaatggttaaagtaatttttaaaggcattttagctttcaaaggaataagcttcagtgatctggaaaatccatttaagcaatgcttatagtatgaatgaggatattgggtcttaggaataggaggatgagagagcatgaagaaagagaaagcttagttaggagaagagcactgggccataaaaatagataaggaagaaaggaagaagcacatctcaaaggaagagagtggtgagggggttggggggtgatggatttctcttggtagcatcacacacgaaggttgcctgctcagattacaggaggtgcataactatgacctaagcaatcacttgattgcttcgggaaatggtagaatttctgtgatggtctttgtttctcactgtaatgctttgtactaatcaatttgtcaacaactgattgaatcccaattatatgtcatacctgactctggttcactgatagaagctacaattgagtcacatcagtgtraccacaggctcctaatcttttgtttagaagtagttagtggccgtgctttcacttacttttattttattattgtttttaagagcaatagatcttgaattgtggggaatagtttggcaaactacatcctgttggagatttttggagctataagtgaccaaagtttatgttatactatgactaactgattctctccatcactcacaagagtaagtaggaaaacctcaggctttgaattaagacaaaattttaattcatctcaattggtggtttgctagacactttcttcctcatcagttcttttatacagcatagcatgaataggctccaaggctggggctggcccaaagccaactaagggcacagcctgagagactgttctaatgtagggtcactgagaggcctcaccatattactcttttcatccaagtggttggtttggttcaagacttctatcattataactcaccatatgcaaaagtgaatctgtctactaatgcattcattcagtaaacttttatctggtccctgtaatgttcaaggtatcatataaacactaaaggaccatacaaagttgatttaacatatatttatgaaacacctattatgaatgaggcactctactaagggttggcaatacagtatgactaaaacacagttgttggccccaaagacatcacagtttagtggggaaggttggctgataaaaagacaagatagttcagggttggacatgttatgattgggatcagcatggagtcctaaaagaacccactggcagagcacctaaccttatggaagacttcctggaagagaagacatttctgacgatctcttcaaagaattttagtaatttagtaagtgcctaaatcatgaagggaagttttggaggatcatgaaagattttattctcagacactttttgtggtgccctacaataaatgatgggatttgtagcaattattgttcttcattgattgttttgagattttggtttctttaatatttggttgtccttaaaaattgtatcagctagcaccttaatactaagggaaacattttcagctcagaatcgcatctgggtttgaaaaggactcttccccactgggtaccatactcttaacaacagacctttgctaaaagggcatctcaactttacatggcttcaaatataatcttatcatcaagtgaagtaatttacatatcattagttaggtcatatttttagattttattttctgaaaagattaattttaatcagccctgttgcttaattagagtgaccagtttgaaatacttctttcagagcctcagctttagtaaaattacaagacatttttccctcattgaatagaaagctagaaattttagatcaatatcaccaaattagtttgttaaattgatgccatgagtggtgacctcctatcgctgaaaaagagatgcatgtgaacagagagatgctaatgaactcttaaccctgtgggtaccatcctgatgctatccagtggaagccctactgccttgttttccttttttttctctcttccccaccatcctccacccactacacccataattttccagctgtcaaggtagtcaaacattttctttattttctatcactgaaatgcttcacactgccacagtggccaattttattttccttttgaggtgaaggtagtatgttacaatcagaacagacctctgaaatagggtttgcagaagaagaaaattaacgtggagttgaccagagcttattgtttgatgtgccttcaggaaatgtccaaattcactgggataatttccagatgtctgttgtaaaatgcttccataggaaataggcgagactgtgggaaacatctggtttttgtctctgtttaagttaattaattatggtctgctatttttccccctacaggtcatctgagtgcagttcagagttgtagctactctggactttctgtatctgtcaacttaatcaccatgtcatagacggtttgttgcatattagctgcagaatgagccagagggtttcgtttactggaactgggtgaagcatgttttatggcatgaggttttgcttctttgaaggaaacctggagaaatgtcagtagccggaatcctaaatatcctagacactcacaccccagtagactagttcctcatcatcctgtgtgctttttagttcccttattactctaagactaaagtggattcaaacccaaactatataaagtaatacgactaatcctggaacaacagggcagttcttacacatccaaatgagtcttgccctctttgatgcggttgtcttgaggggcttaacactgaaaggagttcagtatacattcaggactccttttagaatcactttcagagatagtgacatactctcttgaatgagctttattatcacaagtcttaatctcttgaagacatgtgagattcttgaagaaaatcttgaagattttctgaaaaggttaaggcttattgagtgtcaagtgtgttgcataaggtggatggattagttgaccattactatttggggcttaaaatgaggtttaactgaagacattcattactctttgctcatagtagaggtgaaataagacatcacagaggtagcaaagaatttacccacaacaaattctggtttaattcgagataagaagttttaatacaagaaaatctgtcatcgcaatagaaagtgtgtttaccattcaaacataataaatataattktagactattggatgctttcctcaaattttgaaattaaggttatactggtttcataaaatgagttggagagattttcatctttttctcttacttataataatttgaatccctgggttgcaaactcaaacttggctatacactgcagtcacccaggtgattctaatgtgcagtcaaggttgggcaccatgggtttaagtcacattaaaactatttgctcatgaaaattaaaatagagttctgctagaaagccacatggggccagtgcactgttcatgttttcctcttcttttgaatcagttttgctaggaaatggatgattttcaaggaaatcataaaattggttcaaagaaagaaccaataaaatttgggtttatataaacccaaattatcctttttatttcttttctatttccttagtttcagctcttctccttatttgatgggttttattgtttttctaatttcctaagatgaatgccatctttcgtgaacatctttaataatgaaggcatttaaggctacacatcttttctgattttagtgttaactaggccttctattgcacttgtaattttgcttttaattttctctttgatataatacttattaagatgataatttttaatttccaagaatcttaattcaaggagccagactttttttctaatcacatttttatgagactgcatcctgtgacatttttcttattttgaatttcttaagagttctttgaagtcaagtacgagactgattctcataaaagttccgtggacatataaaaaattaattacagtgttgagccttgagcaatgctggggttaggggtaccaattccccatacagttgaaaatccacatataattttgactcccccaaaacttaacaactaatagcctactgttgactggaagccttagcaataacataaacagttgatgagcacatattttgtatgttatataattataagctagagaaaaaaatatattattaagaaaatcttaggccaggtgtagtagctcatgcctgtaatcctagcaccttgggaggttgaggtgggtggatcacttgaggccaggagatcgagaccagcctggccaacatggcgaaaccccgtttctactaaaagtacaaaaattagccaggcctggtggcacaggcctgtaatcccagctacactacagaggctgaggcagggattcgcttgagaatctacagataatctacagagaatcgcttgagcctgggaggcagaggttgcagtgagccgagattgcatcactgcactccaatgtaggcgacagggcaagactctctctctcaaatatatatattaaagaagagaaaatatatttactactcaactcattaagtggaagtggatcatcaccaaggtctttatcttcatgttgagtaggctgaggaggaggaagaggcgggattggtcttgctgtctaggggtggcagagggagaagagccacatataagtggacccatgcagttcaaagctgtgttgtttaagggtcagctgtattctcttatttgtaatacacaaagttcttcatatattaaatcaagtttattggttgtatattcaattttcccatattttttctattatatatgttaatcattttttttgttgcgtctctgccagggtttggtatcaggatgatgctggcctcataaaatgagttagggaggattccctctttttctattgattggaatagtttcagaaggaatggtaccagctcctctttgtacctctggtagaatttggctgtgaatgttgctgtgcaacaaattacctcaatacttaatgacttaacactataaacatttagtatctcacagtttctgtgggtcagaaatttgggtcaagcttagctggatggattctggctcaggatctctcatgaggtagcagtcaaactattggccagggctgcagtcatctgaaaagttgactggggctgagggacccatttccaagatggttcattcatgtggctgtagacacagcatttcaattcctcactgactgttggcagaacagccacatgggcttctccacaaggctgcctgattcttcttgtgacagagcagctggctttccccaaagtgagtgatccaagaaagaaagcatgcaggaagctgcagtgtcttttatgacttagtctccaaagttgtacatcatcacttttgcttttttttctcttcatgagaagcaagtcagtaagtcttgcttctgctcaaggggaggcaaattaggcttcaccttgtaaacagagtgccaaagaatttatggacattattttaaagcagtaattcaatctgaataacacactgtgtatttttaaacaatttcttcttgcatttagtagttaaatgtatgaagcaaaaatgtgttcttttattgactataagttcatgagttgtatttttttcataaagtgccttttattatgacataatgttgctttgtgatcctgtttagtactttaatcttaaactctactttgcccggtattaatatttccattcttgctttctttttgttgcatctacctcatattcaaccttctcttaccttctttttaatgtatatttctcatgaacactatatatctgggttttgtattttaacacagcctggtaatcttggtattttaatgagagaatttaatccattcacacttagtataacaacagatatatttgaaattttttcttctactttgctatttcactttgtttcacccttttccttttctttttgctgttttggtaaagttttattttttattgttttatttggaatttttactctgcttttccattcactagtggttaccttcccacttctgacatttctggtaaataatgtatatgtgtgtatttctcaaatagctataactttattcttccactgcagtcctctctctctctctcaataagataactgtttacacactccatgtctcccattcagttaagatttctagagcattttatttttctcttctcacctcccctgtaaatcctagctattgctcataccatagttttagttcctgaccattattaggttttccttcatagcatgtctcttctacttctggaatctttgcttaatacttaaatgcaagtttcatattgtcatattgatttatatataattatatatttcatgattcattgttcacatctgtattctctcctcttgatctttccctgacttgaggacttttattttttatttttatttttttttgagacggagtttcactcttgttgcccaggctggagtgcaatggcatgatcttggcttactgcaacctccacctcccgggttcaagcgattctcctgcctcagcctcctaagtagctgggattacaggcatgcgccaccacacctggctaattttgtatttttagtagaaacagggtttctccatgttggtcaggctggtctcgaactcccaacctcaggtgatccgcccacctcggcctcccaaagtgctgggattataggtgtgggccacggcgcccggccagggacttttaaatgttagtatggttatttagttacagtgttttgttgagtgttttcctcagtggggcatgtggatgctatcttctctgaatgcaggctcctcgaatacagggactttgtattgtttacttctgtgttcctagcacctaaaactgtgcctggtacataacaagcaattgatacatgtttgctgtttttgtgatgttaaatactacacatttgcatgtctgtctttcaccctgagcatttatgttgttggtgatagttgatctctttacacatctgcaagtacttttctatcaccctgagaacttaatgtcttggccactgtagaratcttggttcaaagtcctttttcctctttaatttgtaaattttattctaccgtctcctacctcccactactatagatgagaagtctgatgctaggctgattcttttccttttgtaacttgttctttctctctggcctcktctaatctttttaccaggtggtagggattttgtccccatcaattgtgtgtagaagtcgtgtttcaagcttcaaattgaagtcttttttttaaccatagaaaatgttctctcatatttttgtaattattgcctcttcatctgttcctttttcctgattttgaaatgcttattattggcatattaagtctcttggctttgaatgctagtctcttatttattcttcctgattttcatcattttgattttactcaaaatgatgagagtaagagatttttcatctgcttgctctttcaggccaataatgtattttcccaaccattctttcttctagttacctttaacccattgcttttttttttttttttttttttttttgagacagagtctcactgtgttgcccaggctggagtgccctggcacaatctcagctcactgcaacctctgcctcccaggttcaagtgattctcctgcctcagcttcaccctcccgagtagctgggattacaggtgcgtgccaccacgcctggctaattttttgtactttcagtagagatggggtttcaccatgttggccaggctggtcttgaactcctgacctcaagtgatccacccacctcagcctcctgaagtgttgggattacaggcatgagccactgtgcccggccaacccattgatattttaagtttgaatagtatattcttaatgccaagaattaataagtttttgttctttcttgtatgttcttcttattactttaaaaacaaactagttctctgtttcctccagcagtcctgttttattggggaccatctgctttagtagatctgattggtctgtctctctctagttgccggatcctcttaggtactagcttatttccattttctattttctgcttaagctaggttaagcctttccatagttggaggcacaacagtttctactcctgcatcgagtgtgaaaaagaagtctctgtgtttctaggtacccctaaatgcaagtgatctgttcttttcgtttcaaggatgtggaagacatcttcctacactttttctagtaggatccaacatttcagctccccctgcctccaaaccaagatcacacacatgctctgaggcagagccacccccttaatcaagtgtccaccatcccctcaggcctagttcttccatgttttcaccccagggctccctgccgctgctcctctagcccccttcagacctggacatcccaacagagtctatagccttcaacagtcctcaggttcctctagcttactcaccctagacagctgaaggctggtggaagagtaacagagatcagagatgcagaatccttccccctttctttgtggttggttggttggttggttggttggttggttggttggttggttttagacagggtctcactgtgtcacccaggctggaatacagcagtgtgatctcagctccactgagcctcgacctcccaggcctcagacaatcctcccacctcagcctcctgagtagctgggactacaggtgtgcaccatcacacctggctgatttttttgtactttttgtagagaaggggtttcgccatgtttccaaatctgatcttgaactcctgggctcaagcgatccgtccacctcggcttcccaaagtgttaggattactgttgtgagccatcgtgcccagacttctttacgttttgatgaacgatagcctgtatttttgcaactggtttacactaagcccagtgtgaataagcttatatgaattaatacataagaaaatattggggccatgcacagtggctcatgcctgtaatcacaacactttgggaggctgaggtaggcggatcacctgaggttgggagttcaagaccagcctgaccaacatgatgaaaccacatctctacttaaaatacaaaattagccaggcgtggtggcaggtgcctgtaatcccagctactcgggaggctgaagcaggaggatcacttgaacctgggaggcggaggttgcggtgagctgagatcgcgccattgcactccagcctgggcaacaagagcgaaactccatctcaaaaaaagaaaaagaaaatattggaatcttagaattagaaataacatggtcataataaaatgagtctcttaatttgtatgttgctttaccattttaatgcaattttatatacatggtctcatttgagttccaaaatagccgtgtgtggtaagtatggaagatatcatcctcacttgacagatgagaaaactacagctcataaaggttacataacttgcccaaggacacatgggtaatgaatggacctggaccagagaattcaccttcttatcacactatgccattgcttgtttatttgtttgtttgaaattgccttcagaacatgttacattgtataaatgttttctagaatccctaaattatatgctgtaacctgtattaaattttttcaattatttctattatactgatatgagcaatttaaaatgtatatacataataagatactgagtttaataagatttttaaatgtagtcagaaatctaacaaaagaggaatttgaaaatcatttgaaaaagattaatatttctagaatatgtgtattatttcctgaaggtagccattttgtttttcttttcttttcttttttcttttcttttctttttttttcctcttttgagacggagtcttgctgtgtcgcccaggctggagtgcagtggtgcgatctccgctcactgccagctccggctcccggactcactccattctcctgcctcagcctcccgagtagctgggactgcaggcgcctgccatcacgcccggagaatttttttttttgtatatttagtggagacggggtttcaccgtgtgttagccaggatggtcttttctttcttttttttttagacatagtctttctctgttgcccaggctggagtgcagtggtgcaatcctggttcattgcaacctctgcctcccgggttcaagcaattctcctgcctcatcacctgagtagctgggattataggcgcacaccaccacgcctggctaatttttgtatttttagtagagatggggtttcgtcacgttggccaggctagtctcaaactcctgacctcaagtgatctgcccgcctcatcctcccaaggtgmtgggattaaaggtatgaaccaccatgcctggcgaaggtaacctttttgaaggaggacatgcatttttatatatgagtagttaaatttgtctctgtgtaatatatttttaaaacatttgaatttgtcttattatgcagtagaagccatgcagtagggaaatagccatctccctatcaaacatgacatcgagaaaatgtaggcatgttacatgtgtttgttttgtcttagagttttatagtatagtactaaatgaattaatagctattttaaagaccaggcctttgttctgatctctgctgcttttcatgctaacactgtgtttaaaagtattttttcatactcaagagtgatattaaaaatacttaaaaactgatatggcccggtcagtgatcactgagaatatacccgggctctgcacacctggtgtagttgctcgctggcagtacatccgagctgctcagtcacatcacatagcactcttcacttgcctgagtactttcatttccattctcccaggtgatctggggagggatgtagtgccatccccattttgcaaattgggggaatcacagccccaaggagctgaccatagggccccttagaataaaggatttctggctcgtagtttggtggtcttccttgggtagaagtttccctcttttcagaagagaaggaagaggtcagaatagccatgtttgataggacaaatatcagctcctttcagaggaaactcatagtaggtggtgggtagaattagcaccgtcccatcctccctggaatcttccattcccaagcagatttgtcactttcagggcctttgcaggagatgcctgccgtggaagagtaaaactggctcaagcgagagagcagatttttcccggtggaagaacctgactsagcctcttttttccatattaacagggatgttatgtacacggcctgactttaaaagtatattcttttaattccttgttttttcccttctcctccttccacagaatggtctyccctcagagaggaacccgtatgtttttaatggtgactttgtagatcgaggaaagaattccatagagatcctaatgatcctgtgtgtgagttttcttgtctaccccartgacctgcacttgaacagagggaaccacgaagattttatgatgaatctgaggtaacccaggcctttagattttctcttttaaaagtttcgcactctggaaaatgctgccatatttaattcctaatagagatagaagtgagtgtattggaagagggatgagggggatctcaaggaggacttcaattcttacccctttcaccacccccattattctgctgagtatcagttgccctgaaactcccttcctatcttttcttccagttctgtccgttcttctcccttctattatgttctttctcttgctcccatgcccgaccttcacaggctaaattgtgtgttgggtaggtgtgtgaggccaggtttggaggtgtggcaggttcttcgaacagatttggatgcagtcgttctgttgctactcttggcttgcctcagatgttgtctcagaaactagttccatgtttttcaccgatgcgtgtattgttttatgacatgataattgcttctggcattgttgctcataaacatatttacgaacacagcatttcaactatctaactcaccagaaacttgaggaataaagattggttagatggtttaagaatctttgctggaaggcacagtaggtgacaaatgttcccttttcccttctttttttcttcttcttttaaaaaatctcttgttttatgaaaaacagaaatcagtttgctctaggacagtggaagatatggcatgtctcatgcttttggtcctgggcttttgggtgccttgatcaaagctcagcaactgattagttttgtctttggggcagttttggcgcctggcttgagtacagagtttcaattctaattctcaaggtatggaagcaaatgctaaaactatgaaggaaaaaaatcccaggactattatcagaggcccattatatataatatagcttgatacttttatttaggcatgctgtttatccttattgcctatcgtatttatctagtgtctataatggttaatgaaggagacgtggcccctgccctcatagagcttacatctagcagggaagatgcgtgttgagcaggtttttcaagtgtgatgagtttgtaaagggggaatccaaccttgtctgagggatgatggaaggttcccccatagaaatatggctttagcctgagagctgaagaatgaattaggcaatcaagaaagagccatagagggggatgggaaacagtgttccacagtgaggggacaacttatgcagagctcaggacaagactgtttagatgtgaaagaagttcaggaggacaggagcatagactgagggacagggtggtgcctgatagggctggagacataagaaatgattggatggttcaaaggaatttggacggacttccaagaacaacacaatgtcaccgaataatgtcataaaatttgtgttttaaaatgcagtaggaggagagagttggagaggggcaagagtgaatacacrctcgtcaattaggaagtagttgaaggttaaagggatagataatgggttctcatttagactagggtagtggtgatagagatgcaaagaaatagattcaagaggagtttaggcaatgatgatttaaggctcagtaactggatatgggagagctgaaagaggagggaatcggccgggcatggtagctcgcgcctgtaatcccagcactttgggaggctgaggcgggtggatcatgaggtcaggagattgagaccatcctggctaacacagtgaaaccccgtctctactaaaaaatacaaaaaaattagccgggcatagtggcgggcgcctgtagtcccagctactcgggaggctgaggcaggagaatggcgtgaacccgggaggcagagcttgcagtgagctgagatagcgccactgcactccagcctgggcgacagcgcaagactctgtctcaaaaacaaaaaaaaagggtggggggagggaatcaaggatgacctccagattcccagcttgagtttgggggtacagcggcatcattcacgatattgggaatgtggaaagaggagagaggttgggatgagggggaatgatgaattcagttttgggtaagctgatttgaggtactattgagtaggcagttgagtgtacatacrtgtccagagatcagaaatgaagtgtggcctggaacatcatcctgtggtattaacactagataaaaactgaaagcccgggcagggatgagattcccaaaggagaaagtgaggggagaagagagcctaggatgkaatctgaaggaactaccacatttaaggtgaggtagaggagagcttgcaaaagaggctcagaagagccaggaggaaaaccaagagagtttatggtcacagaatccaaggaaagaaaagttttctagaaggatggtagagtcagctgtatttagtgtttcagagagggcgaggaaggtgaggactgcaaggcatctgttggattaaatagtatggacacctttggtgagtacaggatggaattcatctcagaaaacagaacgttacactgtagaagcctgatgtgacatgatttccatggaaagccagagtgagtgtattgcatttcatcttcacagtgtgggatattaagggcatgtactgttatcctaaagcaaggaaaggtaacagaaatattgtcatcattgaatctcccttcactactgctattcaggcattaaggttcctgacactttctattaaaaccctcaataccattatgggacctgtatcagagagagcataacaagccaacttgttacctgctaggtaacaagttgttcagtcttttctttgttcagtcttttcttttttccaatcatttactgtataggatgtctgagaaattctatctaaatgaaaagtcttctctcacacagcttcccccagctaccacagcatgcttctctgcatacttgtagcgtttacaaaacctgtgcctaccacatatttcttaagttgtcttataattgtttcatagaaatctatcttctttccccagctatactataagctccttgagggtagggatgatgtcgttggttgcttttatgctttccaatcatgcctagcaaggactcaggtaagtaacacttccaactgaactctggtttcttgagttcttgtgatagatactgagatgccaagggcttccctttttgcatgactcatggaagtaggcgttatcaacaatcaaatcatttaaatcccatttttttttaggtatggcttcacgaaagaaattttgcataaatataaggtaagacatgctttttttttttttttagtattcactttgctgtttctatagagaaatttaaaaagagccaagaaagaccagattgatgctttaggaaaggtaataggccaactagtcagaatgcatgccaataaaatacaagcacagcaggaagccctggccacagtagagtcttatattttctttctggattaaaccacactttttcattgtgagttttgtgtaagttttagcatagatacatatttcattgcttcaaaggtaccaaggatttgttttacttaggtgtggtaaaatatgcagacacagaaatgactgtcatgaaggaagagatttttatttacaattctctagaaaatggaggcactgcaagccactctgggagaccgcgtggggaagcaccagagttggtcagaaggcagagggaggctgagcacggtggctcacacctgtaatcccagcactttgggaggctgaggcgggtggatcacttgaggtcaggagttcgagaccagcctgaccaacgtggtgaaaccctgtctctactaaaaatataaaaattagctgggcgtggtggcatgctcctgtaatcccagctactcgggaggctgaggcaggagaatacttgaacccaggaggcggaggttgcagtgagccgaggtcgtgccactgcactccagcctgggcaacagagtgagactccatctcaaaaaaaaaaaaaaaaagaaggcagagggagggtggagggaagcatctgagtgtaatctggtttaggactgaccaatttgagtaatttcagactgctctgggccacagaggttgtccctagttgtctggtaactggccccgggatgaggagtgtgagagctccataaagaaggtagctggggtgtgggctctcggttgcttggtttgcatatgaagggcgagtcattgactatctaggaattagctagccccgggagggacagtctctcctccagagtcagcaaggccccaagatgtcatagtatcaaaaatacagaataaagggccaggcatagtggctcacatctgtaatcctagcactttgggaggccaaggtgggcggatcacctgaggtcaggagttcgagaccagcctggccaacatggagaaaccccgtctctactgaaaatacaaaaattagccagtcgtggtggcacacgcctttagtcccagctacttgggaggctgaggcaggagaatcgcttgaacctgggaggcagaggttgcagtgagccaaggtggcgccactgcactccaatgcgcaacagagcgagactccatctcaaaaaaaaaaacaaaaacaaaaacagaataaaaagacatgatgaatacatgctaattggttagtgactccttgctgacttcctttgagtggcctgaaaatcattactttttgtccatacttggggactattcaataaactgaacctgtcagaaaaacaaaacttactcaagctcttacttacagctacatggaaaaagaatcttacaaatcttggaagaattctatgcctggctcccaatcggtacaatcgttgacaatgaaatcctggtcatccatggtgggatatcagagaccacagacttgaatttactccaccgtgtrgagaggaacaaggtaagaagtaatgttggcatgaatcttctctcagggatttagaagggaatacatacctcttcatttattattttgaattgatttgtgttttagtggttgtaactctaaaaagattrtagattttattagagtatataaaagtataaattttaagaaaaatctatgactgcatgataaagaactaagtgggtaacttctatatatggaaaaaaattttaaattcatgttgagggtggaaaaatgaggaaatgttggcattttatgtagtttctaaaagtgaaaaatcctgatttttaaaattaaaacctcaattcattcatttatattgtggtaaaatatacataacataaaacttgccactgtaaccatttttaagtgtatagttcagaggtattaagtatattcacattgttgtgcaaccatcaccatcactaccatctatttacagaattttccatcatcccagaccgaaactctggacccattaaacactaactccccattctcccctgtcccagcccctggcaaccaccaaccaccattctaccttctgtctacgaatttcaccactctaggtaccttatataagtggagtcacttatataagtgcagtttatttctgaattgatacgatttcccacataatacacatcaaataacttaggatactttttttggaaatatttttttgaaatgtttaaataatcatgttaaatacaagcagagcaggagctagtatggaacctctgagacaagtggctatgtggtgactgtgaagatctcacgcctagtgaagggttccttggacgggtcttgcagggtcattggagttgtcttcctcctctactcaagccaagaggaagccctcaggctagaggtgtaggggcgccacatgggttgaagaccagtaacagcagtggagccagatgatgctatatggtcctagtgggaaacctgaactgttacccctcaggactgatcatcaacttccaaccaacctggacaggtggggtctagagctggaatttaatctgatagagacagaaatgtgaccccagtggcaccttgacttcttggaccctttatacacatgtgaatgagaatgtcgttgctggtatcctcccatctttttaattaaagtttaataagtctgacctccagaccagatgagatccccttttgtatactgtcaagccctttgtacatatctttcatcacagttaccgaatttaagtaagaaattgtggtactgtttgtttactatcttcctctgtttttctagtccattgataaaaccccagcacctgggatgtagtaagtacttaatagtcactgactatctcttgagggatttaagatcaaagcagggtaaacctaagacaaaactgaatagaaagttttttacagccctctcctgattctgtggtgattttacataccacccttccccacctcaccaactgatgatgatgcttcctggcttacacctgttgtcctattgtaattattaatagcacctccttttactctaaaaaaaaaaaatcccagttgcagccaggcatggtagctcacccctgtaattccagcactttgggaggttgaggtgggcagatcacttgggaccaggagtttgagaccagtctggtcaacatagcaagatgtcatctctacaaaaaagaaaaaattagccaggtgtggtggtgcacacctgtggtcccagctacttgggaggctgaagcatgaggattgctggaacccaggagtttgagattgcagtgagctatgatcgcaccactgcactccagcctgcatgacagagagagaccttgtctcaaacacaacaaaacccagttgcaataaaacttaagcccactctaagtttaaggtacctttctcattatatcagtgagtaatcaagccaataagacattttgatcaagatataatagtcattattaacataatgagtggattagattctaaccaagagcacaagggaacatgatgtctttgtcagtcaaatattggtgaacacagggcatgaatgccacattccatcaccacctgccctatgactacagtgctaatcagtcatggcagcctcttccaattgaccagattgaacacttttgctttcctgaggttagcctgagcagccagctctatcgagggctttttgagatattgagaagatgcctctgggatgtccctcactagctctgtggagatcccaagttgagggccaccttaacatagtaaagactgtgaggctctaagattagacagacagaactaggttaacatcctgcctctgccccttcctgggtgactgggcaacatactgaggttttctaatccttggtttccacacgtataaactgaagataaaaatacctaccatattggatttttgggaggattaaatgtaattacctatatgaagaaaatggtggccaggcgcagtggctcacgcctgtaatcctagcacttttgggaggctgaggtgggcggatcacttgagggtaggaattcaagaccagcctggccaaaaaggtgaaaccctgtccttactaaaatacaaaaaaatagctgggcatggtggtgcacacctgtaatcccagctacttgggaggctgaggcaggaggatcacttgaacccaggaggcagaggctgcagtgagccaagatcaagccactgcactccagcctgggtgacagtgaaacactatctcaaaaaaaaaaaaaaaaaaaagaaaagaaaagaaaatggcatatactactaaacatatagctttctcctccagttctctcttcttttttccttatacttggttctgaggtttgtgtttcagtcaccaatacagaccctggggagagtttgtgggccagccattttctcaggatacctaaagtttcacccccttcagggataactgttctacctgctctttagactggctttaaagatagaaattcaacttgtatattgtttgtgtcttctacccttccttgagtgaggttgaactggtaacacatacttgttgtattaaatatcattgaactgtagtgaaaatgataggttcaaccatttggaactctatcagatgagacataaaagtagattgttccagtccagttttataatccccactttcccatcccataggaccctccaaccctctgtggcaggagggaccatacttcctggtttacacctgcggtcgtaatggtatcattgttaacaggggttgggaagggttgggggaatttgatgacaacctctattctaggttcatttaaggtattttgtaaggtgggcaggttgaggggggtcaatgcagagggattaaagaatgaaggaagattttctaaaactaagattctggtttattatttgtcaaactccccagcaaggcatttgcagaaagatggctactagactccctgggggaaaatggtcgtgtagtgccttagggagagctggggcaaagtatcctgatcccaaatggccttgaaaacttcagagccacacatacttaagagaccatgtggccttgctcaatgagctcatcagaaatgagttgtgtacagctgggcacggtggctcatgcctatagtcccagtacattgggaggccgaagtgagacgatcacttgagaccagaagttcgagaccagcctgggtaacatagcaagaccccatctttacaaaaaaaaaaaaaaagaaagaaagaaaaagggaaaaagaagtgagttgtgtggacccaagtccagagggtcctcccagaatattctgctctgcccctaatgggaacatttgctggcaggagacagggcaggtaggctgtgaactagctagcaatagctgagcttgaatttctacctagctcaatgagacaggacctcagaataagattcaatttcatttttgaaaaataaaggtaagatttcctacacactctagtttgtaaaagaaactaagtgcttggccgggtgcagtggctcacgcctgtaatccsagcactttgggaggccaaggcgggcggatcacgaggtcaggagatcaagaccatcctggctaacacggtgaaaccccgtctcttctaaaaaatagaaaaaattagccgggcgtggtggcgggcgcctgtagtcagtgctgaggcaggagaatggcgtgaacccgggaggcggagcttgcagtgagccgagatcgcgccactgcactccagcctgggggacagagcaagactctgtctcaaaaaaaaaaaaaaaaaaaaaaaarggaaaytaagtgcctaccacagagaatttgtctatcactgaaccacggccaccagtataacagaagtattgtttaatattgttttgtttaaagacatggtgctacaaagaaacaagtataaaattacagtctctgcttgtgtaagggaacaagagggattctagtaattgatgccctatcagaaagacgttttgttttccaaagaaacgcagcagttttgttgccaagattagagaacatcgtcaatggctggcagagtcaggctgagaaccacaatgcatttaggttggaagggcttctgaagttttcaacctatgtcccctttaagaactttcttggacacagatgtaccttttctcttttcttctggaaagcataacaaaatgcacagcagccactctattaagaggtgtttctgaactcctgaagatcctatggctagataaaggctcaataaggagactcgttgcccctaccttggtatcttccattttctgtgtggatgccacagaatgtgtttaacacctatagagaaactccagtgaaacacagaaactctttctttataggcaatgtctgtaattggaaaatgtaccaacaatgtaacagacccactttacagacatcagtggatgagtgagatataggaggtggacgagatgcaaaaagtgaccgtgtgtttttcattgggttgtggcaccacaacatagaaagaatcccacctgggactgaagtctctgtatgtggcagaataagcagagggttggactaaagcatgaatttgttttatagatgaaatctgtgctgataccaccaacggaaacaaacagagaccatgacactgactcgaagcacaataaagtaggtgtgacttttaatgcacatggaagaatcaaaacaaatggatctcctactgaacacttaacagagcatgaatgggaacaggtaggtaatcagggtgttcactgcagtggcaacaatgacactagcgtgcatgttgtcccttacaatatatagataaaaagtgactttacctttacgaggagaccacatgattctcttggaattcatcactatatttttaacagctttattgagatataattcacataccatgtaactcacccatttaaagtgtataattcaatggtttttggtatattcacagtgttgtacaactagcaccacaatctaattttagaacgttttcatcatctgaaaaagaaactacatacctattagcatcattccccattcccttctgtagccaccctgtgccacctaacagccttaggcaaccatcaatctactatctgtctttacagatttgcctattctgaacatgttgtagaaatggacacatatgtgatgttttgtgtctggcttctttcactcagcacaatgttctggaggctcatccatgttgtagcatgtatcagtactgaacatctatttgttgctgaataatattccattatatggatatacacattgtatttattcattcataagctgatggacgtttgggttgtttccactttttggctactatgaataatccttctatgagccatcacatacaagtttttctgtgcatgtatgtttttatttctcttaagtgtgtacctaggagtggaactgctgagtcataaactaattctaaaaaagtttaacattttaagaaagtcccaaactgttttcccaagtggctgcaccattttacatttccagtagcaatggatgaacgttccaatttctccacatcctctctaacacttgttattgtctatcattttgattatagccatcccagagggcatgagatggaatctcattgtggttttgatttgcatttccctaatgactaatgatgtcaagcatcttttcatgtgtttattggatatttgtagatcttctttggagaattgtctattcagatcctttgcccatcttaaaaactgagttatttatctttttattattgcattgtaggaggttttttgaatatattctaaatacaaatcctttatcaggtatattatttgcaaataccctctcccattctgtgggttgtcttttcccctttcttgatggtgtcctttgcagtacagcagtttttaattttggtgatgcccagtcaaaatgatatattttttctctttggttgctcgtgtttttggtgttgtatctaagctattgcctaatccaaagtcataaagatctattactttgttttcttctaagagttttatacatttagctcttaaatttaggtgtctgatccattttgagttaatttttgtgtgtggtgggaggtgagattccaaattctttctgttttatgtggatatttagttatcccagcaccaattttttttttcttttttttgagacagagtctcgctctgttacccaggctggagtgcagtgacacgatctcggctcactgcaacctttgcctcctgagtagtagcttggattacaggcatgcattaccacgcctggctaatttttgtatttttagtagagatgagatttcaccatgttgaccaggctggtctcaaactcctgaccttaggtgatctgcccgcctcggcctcccaaactgctgggattacaggtgtgagccactgtgcccggccaccagcaccatttcttaaaaagactatactttccttgttaaattttcttgacacccttatcaaaaaatcagttaaccataataaaagggtttatttctagactcttaattatatttcacaatctctatgtttatccttatgtcagtactgtacaattttgattactgtagctttgtgggaagttttaacattgggaagtgtgagttctccaactttcttcttctttttccagatcgttttggctattctgggccccttgaatttccatatgaattttaggattgatttgtcaatatctaccaaaaagcagctgggatattggtagggttgccttgaatctgtaggtcaatttgggtactatggctgtcttgagatgtctttccatttatttagatctttaatttcaacaatgttttttacctttcagtatacacgtcttgctcttgttttgttaaatttattcctaggtgtttttgatgctattgtaaatagaattgttttcttaattacattttggattgttcattgctagtgtatagaaatacaactgacttttatatactgacattgtgttgtgaactttgataaacgtattagttctaatggtttttagtggatttcttgagattttccacctacaagattatgttatctgtgaataattttacttcttcctttccaatctgtctgccttttcttttccttttttttctttttgcttaattgccttgtctagaacctccagtacactgttgaataaaagtgaagagagtagatgtctttgtcttgttcatgatactggggaaagcattcagtctttcatcaagtatgatattagctgtgtatttgtttgtagtggccttttattacattgaggaagtttctttctatgcttagtttattgagtgtttttattgtgaaagagtgttggattttgtcaaatgctttttctgaatacattgaaatgatgtgttctttccctttattctattaatacagtatattatattgattgatttcagagatgttaaaccaacctgacattcctgggataaatcccacttggtcatgatgtataatccaccttctatgttgctggtttccatttggtaatattttttgaggatttttgcatctatattcataagagctattggtctatggttttcttatgttgtgatatctttgtctggttttggtataagtttggcctcataagaggaattggaaagtattgtctcctcttctgtgttttagaaaagtctgtgaaggattgattttaattcttcaaaggtttgatagaatccatcagtgaagccatcagggcctgggcttttctttgcaggaagttttaaaattactaatttcaatatttttccttgctatagttgtattcaagttttttgtttcttcctgagtagtttgtgtcttggtagttgtgtctttcttggaatttgtttcatttcctgaaacaaatttatttcatgaaattcatttcatctaatatatctaatttgttgacctaaagttgtttgtagtacttctttatttttttttctcctgaaagtttggtagtaatatttccttttttttgttggtcagtctcactaaggtttgtcaatgttattgatctttttgaagaaccaacttttagttttattgatttttctctattgttgtctattctctatttcatttatttctgcactaattgttaacagtggagggtgtccaggttcttggcgtcttgaacaatgaattggacaaaacgcacaaacaaagcaaggaaggaatgaagggttttactgaaatgaaagtacactccacagtgtgggagtggccccgagcatacgggctgaaaggccctgttatagaatttctgggagtttcaatacccccagaggattccattggttacttggggtacaccctatgtaaatgcagagtttgaagtaaagttacaaagtcatttacagcataagcccaatggagaggatatttcctgtcatagctgaagtgtgaactggccttatgttccctgcctccagaccttattttcctgcctcataatctttatcatttccttccttctgcttgttttgggtttagtttgctcttctttttttcagtttccttagaaggtaatatcattgacttgagatcttttttattttttaacaaagatacaaatttccctttaagtactgctttagctccatcccttaagtttgctatgttattaaacaattgctgctgccttaaaaaaaatagttttgctatgttgtgcttttgttttcaatagtattgtctaaatatccttgtgatttctttaacttatctgttatttggtagtgtgttgtttaatttctacatatttatgaattccccatatttctttcgcttattgatttaaaatttaatttgattgtggtcagcgaacacatgctttgcctgatttaaattcctttaaaactttttttctttttttggtaaatccttttaaaatttgttgaggctttttttgtggcctagcatatggtttatcccggagaatgctccatgtgcacttcagaagactatatatttcactcttattgggtggagtgttttatatatgtctctttgaacatatttataatagttgctttgaaatctttgtctgctaagtcgacgtctagtcccttcaaaagcagtttttattgcctgcttcccccctccgctccccccaccccccgcccgtgtatgagtcatacttttttctttgcatgtcctgtaatcttacattgtagtaaccctaggtagttattcccatgcccctctggggcttgttgttatttgcttttttgtttatttgttgagtgacttgtctggactagtttagtgaagtctattccccttcagtgtgcagcctctgatgtcactcttcacagagtgctgccttgggcatgcatacagtttctcccaccaccagggctggtgtggatttaattgggctctctttgactgtctctttccctgatctctcctttaagcttcggacccatctgcctctatttgaagcagtcccagctgttagccttcactaattgctagccgattgctctattgtttttaacaataacaatgccctggcccacagagtgctctacagtctgatccgattaaagttggacccctttgcaggggcagggctttaaccatgtttgaggcttactccaacctccacaaaggctcttttctcatctgtgtctttccccgattcagtctgttaaatttcttctagctggggtactgttactactagtatctcggcactaccatcctcctcgtaaatgcttattcccaacatctccattgttttcaacagtgcctttaggcatgaacttccttacactctgtgccaaataaggccagtcccttaggaagagtggcagtgctctgttcttgacctgcctcaccccctgggccaaaccactgtgccatcgcactgcagctgggagcagggacagtgacccacttctcctccagtgacagccccattccacaagtggggtagtaggcagggatgatagctcctggtcttcttggcttgcccttcttggcatagcacctcctccttatgattgagcaagcatgggggcagttggggtctagcacctgcaggctgccatgcctaggatagggcttctgcccaatgagcgggagaagtgaccccagtcctctctgctgtgcttgcctggaatccagcttctgtaacgcagagctgaggggaatgagggatgcccatcagcttgctccttctggggcaaaaccatagccctctactgggagctgggggaagaaggagccccgtcttggatgcatccacttgaagtagagcatccttcatgctgatcagtgaagggggttagagtagatcatggctcaaatgccacagactctctctgttggtatcaaaatttagtaagttttcttaaatgtttctccatatgctgtatgccattaggacaatttccagtggctttaactattttaatttttttttaagtgattttccgctgggcgtggtggctcacgcctgtaatcccagcactttgggaggctgaggtgggcggattgcttgagcccaggagttggagaccagccttggcaacttggcgaaaccccatatctataaaaagtacaaaaattagctgggcgtggtggtgcatgcctgtagtaccagctacttgggaggctgaagcaggagcatggcttgaacctgggaggcggaggctgcagtgagctgagatcgtgccactgcactccagcctgggcgacagagtgggaccctgtcttaaagaaaaagatgttcaccagttaaatggttgtttcactggggagagggtctgccaagcccctaacactgccattcctgtcactatgttgtcattttgagaactgtactgagtatgtctataaacatggatgtaaaggcaataagccatgtactcatctttgtgacagcgtgcatatccagagctgcctgtctggagtctctggcagcttctggcatggagtaagatctataaatattcctctcattcattcatccattcaacaagaatgtattgatcactcctgagtactcttgctcatttgtcttggtgaaatttagcgtttttctaaatttccagtcctacattttaactgctttcttgtcagtttttaccctatatggcagggatgagttcttaagaacaacagctatgtgcattatctcattaaatccttaaagcaacctgatgacgtagataatattattcctatttcccgaaagaggacactgaagctcacataagttgaataatttgctaaatgatgggtctggttttgattccaaatttgttggactctacgcttctcatttttgamtgctaggtcataccatgtctctcactgtaggaaaagatgttacaggacactgggttttgtttgtttggttggttggtttcctttttttgagatggagtctcactctgtcacccaggctggagtgcagtggcgcaatctcagctcattgcaacctccacctcctgggtttaagcaattctcctgtctcagcctctggagtagctgggattacaggcatgtgccaccacgcccagctaatttttgtgtttttagtagagactgagtttcaccatattggtcaggctggtctcaaactcctgacttcagatgatccacctgccttggcatcccaaagtgctgggattacaggcatgagccactgtgcccggccccagaactctggttttcaacttcttacatgggaatgttatgacctcttagaaaggacttttgaagacttttcttcaggtttcctgttctgaaagaaatgaaataaaattattggatatggactaacgcttaatgataaaagtgttcttcctgtagatagaatcataaccataataagtagctttcgttttcagatataaacacacatacatgcatttgcaatgtcacaagtacacatagacacgtgcccacatgatgttggttacatctgtagctgggaaacataattaaacaattaccaaacagtgttaaatttcttacttcccttcagtaattgttaaagaaacctctttttcttgatttgggacccttataccttgattgctgaaaatgttgactaaaatgtgatttctggtgtaaaatataccctaatcaatgaggagagagagaagtggggagacagactgagggagaaatggaattcatcattggctgtgagtccaaaatatttaaaaatcaagtaagcatgagaggcatytcatagcaagtaggaaaggatgcctccttaaaccttgacatccaaatcccaaagactgaaggttagaacaagctcttctaggattatggtgaataaagaagataatgttaaagaaattggagctgcacacaaagaaaattgtggcctctggaagcctagaagagttagaagagccttaagaagtgggagggaggagactggggctcattattccataacagagcctcccactccccaaacaatagagatacagcatcttgcagaccccacacacatgatcagagctgacattgggtaaaatgggccagaacctcatttctgatgtttaatcattttagttgtgcccctaattttctttcctcagttcctggtacatagtggataaacacacacataagttatgctagagccgaaatttccagataaaaacagagctgacaattactttatttcttaatatctatgagctattttgtataaagatcatatactctttattttgtcttgtagtcatggaaattcataattcttggcagagtgctatagtttaaattttcccttatgttcactgagatgtggggatatatttaatcggagttaagtcactatacagagatgaatatgatactctttaagacagacttacaaagagacagaggccagaaaggtttcaaaaataattttaattatttatagtctgaatgactccactctctttattcattcatttaacaggtatttattgagcacctactatgtgtcagacactgttctagacttctgggaaatgtcaatgaccaaataaagatccgttaccttgcagagcttacattttagggggaggagttagatgacaaacaatacaataatgagtaaatgatatgatatcttaagtgatatgttcttttttattattattattatttttagacggagtctcgttctgtcgcccaggctggagtgcagtggcgcaatctcggctcactgcaagctccgcctcccgggctcacaccattctcctgcctcagcctcctaagtagctgggactacaggcacctgccaccacgcccagctaatttttttgtatttttagtagagacggggtttcaccatgttagccaggatggtctcgacctcatgatccgcctgcctcggcctcccaaagtgctgggattacaagcgtgagccactgcgcccagtcttaagtgataagttctatgggaacaataaaaactagagcagagttaaggagaacaggaaaactggacttggggacaaaattgcaattttttttttttgtttgtttgagacagagtctcactcctgtagtccaggtgggaatgcagtagtgcaactacggctcattgcaaacctgaccacctgggctcaagtgattctctcacctcatttttttattttttatagagatgatgtctcactatattgcccagactggtcttgaactcctgggctcaagcgatccttcttcctctgcctcagaaagtgctgggattacaagcatgagccacggcgcctggccaaaattgcaattttaaataacgtagtcagcagcattgaggaggctcccaagagggaaatgacttgattgaggtgtcttggctggtcaggaatgatagagtaggatttgatcctgaggttgacttgaatgtccatgctctttttctgaagggatagatgagagtgacaggcattctcaggaaggacgtgacctactttagtcagcccttattcaatgaggcctgaagggtggacagggagcaggaggaaggcatttaaagaaatctaggtacctggctggaaggtttgggctgagcacggctttttttttgagatggagtcttgctctgtcgcccaggctggagtgcaatggtgcgatctcggctcaatgcagcctctgcctcccagggtgaggcaattctcctgcatcagcctccaaagtagctgggattacaggcatctgccaccacgtccggctaatttttgtagttttagtagaggcagggtttcaccatgttggccatggtagtctcgaactcctgacctcgttcatgatccacccatctcggcctcccaaagtgctggaattacaggggtgagccaccatgtccggcctgagcatagcttttaaaatgacatggtctaggccaggcgtggcggctcacgcctgtgatcccagcactttgggaggccgaggcaggcggatcacaaggtcaggagttccagaccagcctgaccatcgtggtgaaaccccgtctctactaaaaatacaaaaattagccgggcgtggtggcgcatgcctgtaatccctgctactcgggagactgaggcagaattgcttgaacctgggaggcgggggttgcagtgagccgagatcacaccactgcactccagcctgggcgacagagcaagaccccgtctcaaaaaaaaaaaaaaatgacatggtctagctgggcgtggtggcacgtacccgtaatctcagctagtcgggagactgaggcaggagaattgctcgaacccaggaggcggaggttgcagtgagctgagatcacgccattgcactccagcctgggcgacgaaagcaaaactctgtctcaaaaaataaatgaattaatgaattaattaaaaatgacatggtcaaaagctggaagggaggatgtataactaagggaaaatatgaaagaatagtgaatctatagtattaatgttttagaagagaagcatttagatatacctttcagagctattaactctccctcgaagcacacttttggagtctggattacttagagctgcagacatgcgcaaggtccttcttgaaggatttattttagattgaggagatttaaaaggctgacacacaaatagatttttgttgaccaggtcatataaaagctgtaattcagtaaaacgttcccattttttttgtttgaaatttttcaggaaagaatgttgtaaagaattaattagtctttcatgcagtgatcaccccaaggatcctgcatttcagaggataatgtgttgttgagatgaaagagatggtttctactgaggaatttgtttcaccaacaaatgggcttttatgcaatttttttgtgagttctgcaattaatcttacgttaccactacgatctgggtaaacctagtcaagtaaatgatttctagacagaaaaaagaaatgcagaactcagggaatggattctgaaggacaagctcagttcttaaaaactgttaccccttatgacttagaatcaaagaaaaatgagtgtcagatatatcttcctcactcctttgatgatgactaagtcctgaatatgttaagtgatttgcccaaggtgacttaggtaattacttgaagtgctaactccttggccagtgcttattctagttcaacagagtcccatcatatgtgcattgaatttatgtaaatttcaattattgtatatggcaaaaaaggagaaaaatactggaaaattttattttcatatactttatcacatatataaaataatatatccatatttatataatatatataaaacattcacatatccatattattgtatagagttgtatgcatacattcatgtacagtcaaccctccgtatgcacgggttctgcattgtggactcaaccaataacagattgaaaatatttggaaaaaaagaaaacaatataacaatacaatctaatataaattttaaaatatggcataacaactatttacatagcacttacattgtattaggtattataagtaatctggagatgatttatagtacagatactctttgatttatgatgagtttatctggacttaattctatcatgtcaaggagctcattgaatgcttgttgcttttgcaccattgtgaagttgaaaatcrttaagtcagggaccatttgtagacaggaggatgggtgtggattatatgcaaatactacgccattttatacgagggacttgagcatccacagattttagtatcctggatgtaggaggtggtcctggaaccaatccaccttggatactgaggggcaactatatatgttaagggtaacttaagaggtttcccaggggtaattttggctataaatgatttgcatcccatgtagaaattggaagcttaatcccctcctaacaaagcccaactccttgatttccatctttcctccatcattatattacaggtcgaattatgtccctaaacatgacatcatggtgtaagagccagatttgactcagttgaaaatgcaagtgttatttttgtcataaacaccagcaaagtaaaggggttccattatatttattcatagagtagggcggtgctgatgttggaattcagtggggagaaaggagcccccttggctgactcttctttgggtggttttaactgtcacttcaatcatcaaaaactctgcaggtatctgatgtgggcctggtacagggtttctcttttctctagttctgaccaggtacttattccagggtagctctcctgccagttctgctcttttcacctcactgtctttttcctcacttattttctagctcctcttccataccaaacttataaacgggtgtacaatcatgtttagcaattcctggtcctcttctccagacctgatttggagccactagaataactgcataacttcacatgcctgctttttcatgcactcaaaagaaacatgtggaaaatatagactgttagaatcagtctgttagaatctgagatactttacaggtcaactggtccaaatgcctgattctaaagatctcaaaagtgagacccagggaggattttcaaggttatgtagctttaatggcagagagagtttttctcaccgctttaagctgttatagaagtttcaataaagaaacattacaggccgggtgcagtggctcacacctgtaatcccaacactttgggaggccgaggtgggtcgatcacctgaggtcaggggttcgagatcagcctggccaacacggtaaaaccctgtctctaccaaaaataccaaaaattagccaggtgttgtggcgggcccttgtaatcccagctactcaggaggctgaggcaggagaaccacttgaacccaggaggcggagtttgcagtgagccgagatcatgccactgtactccagcctgggtgacagagcgagactccatcacaaaaaaaaaaaaaagaaaagaaaagaaacattacagatagatgagagccacaaagacggagcctccaatctttatgaaaaatattattttgttttattttgagatggtgtcttgctctgttgccgaggccacagtgcagtggcatgaacatggctcactgcagcctcaacctcctgggctcagggatcttctcacttcagcctcccaagtagctgggaacacattccggcaccaccacacctggctagtttttattttttaagtttttgtagagatggggttttgccatgtttacccaggctgctcttgaattcctggacccaagcattcctcctgactcagcctcccaaagtgctgggattacaggcataagccactgtgcctggcagaaaaatgattttaaaaatttggatctttagtcctggacatcatgtaacctgcatttgcctctcctgcgccccaaaggaaatgttataataatacaacacttgtggatttagaacacattatggaaaccagtcatttactaaatgtattgcggaaactgagaatgtacttaccatcgaggggggaaaagtgaaggagatgctttaggagacaccctcrgataaacaggtttccacatttgtgttgggaaacagcaagggcttcctcaggctatgtgctcaacaggacaaaaacctggcccagagccacagcaggagacctactttatgtctttgaacatattaagacacacctaatgtgtgggcattgtggggagctaatttcttccctgaatgtgacaatgaagttcttttaagagaaaagaaccttgtagattcaacaattgtcaaacaattgtgatggaatttttaaagccaaaaaaacaaaaaaaaaatggcaaggcctgattcttggttattgttattgctgtattggttattcatggaggagatgaatatgaaacaatgttcttttttctttttcttttttgcggagaccagctcggtaggggagaccctaacccagcagcgctagaggaattaaagacacacacagaaatatagaggtgtgaagtgggaaatcaggggtctcacaaccttcagagctgagagccccaaacacagatttacccacgtatttattaacagcaagccagtcattagcattgtttctatagatattaaattaactaaaagtatcccttatgggaaacgaagggatgggccaaattaaaggaataggttgggctagttaactgcagcaggagcatgtccctaaggcacagatcgctcatgctgttgtttgtggcttaagaatgcctttcagcggttttccgccctgggcgggccaggtgttccttgccttcattcccrtaaacccacaaccttccagcgtgggcgttatggccatcatgaacatgtcacagtgctgcagagattttgtttatggctagttttggggccagtttatggccagattttaggggggcctgctcccaacaattttgagacagggtctctgtctgtcacccaggctggagtgcagtggagtgatcatggctcactgcagcctcaacctctcaggctcaagtgatcctcccatctcagcctccctagtagctgagactataggcatgcaccaccatgcctggctaatttttgtattttttgcagagttgaggtctcaccatgttgcccaggctgggcttgaactcctggcctcaagcactcctcccacctcagccacccaaagtgctgggatcacaggcatgagccaccacgccaggcctgaaacaattttcaaggaagaatgagaagtggtctttgggataccttgggttaatatttctgacaaataagttggaatctagaaagatatactctcacttgtaagttacagcgaaatctggtttgttgttccaagattattgatattctgtggagtgatcccagaggcaaaaatggctgttttccaaatacgtgccgaggagggggctgctattttggaccagatgttacttccaagattcttaataaataccagttgaagatgctcatcaggtctcatgaatgtaagcccgaagggtatgaaatctgtcatgatgggaaggtaagctaaaattgttggtgacattcccataaacatccttcccctaagcacagtcttttcttcacagagcatgtctggcctagaagcccatgagaagatgtcttctctagtaccaaacagaaaccagagaaggcgagcttcatctaggttgtttgaaggggcctcactgtcccttatcctaaaagatatttggtttatttccctgatcttccctaatcccagaaacagaaattcttttttttttttgagatggagtctcactctgccacccaggttggastgcagtggtgtgatctcagctcactgcaacctccgcctcccgggttcaagtgattctcgtgcctcagccacccaagtagctgggattacaggtgtgcgccaccacacccagctaatttttgtatttttagtagagacagggtttcaccatgttagccagactggtctcaaactcctgacctcaggtgatccgcctgcctcggcttcccaaagtgctgggattacagtcgtgagccaccgcgcctggccccagaaacagaaattctgatacatggcactaagtagacacacagaaaggcttggttcttataaggcaactgtcccatacagtggggttgagaatgtccttttcctcacagagcgcataaaaggcagcagtgaatccagtttgctcttgcactttttacatgttccctgtgcagggcccaaaacacaaaacacacttcccttcagctccctgagtaggtgacctccagcaagttgctcactgtagtcagtttagctgcagccactaaaacggagtgtgttgtgttccttcagtggtgtctgatcaaaggctaaaagaggtgaggaccgaggagctggtttcttgtcccaagttgttctgggatgcaccgtttcttttttttttcttttttcttttttttgagacagagtctcgctgtgttgtccaggctggagtgcagtggtgcgatcttggcttactgcaacctccgcctcccgagttcaagtgattctcttgcctcatgctcccgagaagctgggattacaggcgcccgccactatgtccagctaatttttgaacttttagtagagacaaggtttcatgatggccaggctggtctcaaactcctgacctcaggtgatccacctgcctcagcctcccaaagtgctgggattataggcattagccaccgcgcctggcctggaatgcacctttttctatagtgaacagcaataaataaaaatggacaccaagttgtgtggcatttccctctgtgtcagcactttgtttttctgacctttattaattcattttcagctcatactaacattccaagatgagtaaggcaagtattgtttagggtttctttgtagtaagaaaatagatagaaaacatcagtggcttgtctgaagtgacatgctcatcaggacagaacggggcctaaaccaggttccctgtcacccacaaatattgtcctcctggctgggcacggtggctcatgcctgtaatcccagcactttgggaggccaaggcaggtggatcacgaggtcaagagatcaagaccatcctggtcaacatggtaaaaccctgtctctactaaaaatacaaaaattagctgggtgtggtggcacacacctgtagtaccagctactcgggaggctgaggcaggagaattcctggaacccaggaggtggaggttgcagtgagctgagatcgtgccattgcattccatcatggtgagagagcgagactccatcttaaaaaaaaaaaaaaaaaattgtcctcccatattctaccacagcccaaggctagttccttcacaagacagtggtcgtggtcccttattctagccactgcacctctgcccttaaagcactgactttctggggccctgaaccctctaaatcactcagctccaagcagaagaaaaaaaccgaagtaccagacaaattttgttctgaatgctcaactattacaaggcaagaaaataggggatttatccccttggaaaaagaatttgcaaaatcaaacattaaagaggattctgagatttggcactaaaattgtacccgrgaatgcagggccatgcgctgaggacattggctgagtggccaggagttagtgctgctggggacactgggtagtagccttgttttcctccgatgcagtcatagaaatcacatcagactgtgatgatttgcagggtttatgaaccttctttgatttttgctttttaagaattgagctrtttctgaccttattgaatgaccttttgagaactaatgttaygtgaacctgaccctctttttctttaaccaggtggtgactatattttctgcttctaattattatgaagaaggcagcaatcgaggagcttacatcaaactatgttctrgtacaactcctcgatttttccagtaccaagtaactaaagcaacgtgctttcagcctcttcgccaaaggtgtgtatactataccgagagtgctgagcactggtatcacggacccattagaaccagtcccacgtgactaagagcagccacgtgagtgaagagagtcatttatagcttactcattagtatcaacaaaatgkaaatagttccagacaccaagtggtgaatgcacccatatttgaaaccaaaargagcaattttaaattcatacatctttttagatggataaagcagtcagccctcagaaacgtaactgaatgtaaagaaaagaagatccccacacccactcagtcccccaacctacaaccttctctgacccacaaacagctctatctggtcttgcccctttctcttctctatccagaagtgtatgtgacaaatagttgagtgtctctctccatgtgatggcatttgtagcttataytccttttctccctttaacattatctttctaagtgttttttttggttttttttttgtttgttttttttcatttgttttttgtttttttgagacggagtctcgctctgcagcccaggctggagtgcagtggcgtgatctcagctccctgcaacctctgcctcccaggttcaagctgttctcctgcctcagcctcctgagtagctgagattacaagggcccgccacaacacctggctaacattttatatttttggtagagacggggtttcaccatgttggccaggctggtcttgaactcctgacctcatgtgatctgcctgccttgacctcccaaagtactgggattacaggcatgagccactgcgcccggtctaagattttttacattatagaactaacatgtttgttgttaacaactgaaaaaaagcaaagaagaataaagaaattgttaacaacttctctcctttctcaattatccttttccccagaggtaactaaaactggcagtttagaatggccccttccaccctcttcttgctcttacaaaaatagtcaagcatttattcagtcattgaattaaaaaaaacctttgagtacctgccatgtgtcagatactattctaggcatacataatataagataggctgaagtcccctcatcaaacacatatctcagtgtgaagagaaagacgataaacaatgtacatacttttttttttaaagaaggagtcttgctctgttgcccaggctggagtgcagtggcacgatcttggctcactgcaacctccacctactgggttcaagtgattctcctgtctcagcctcccgagtagctgggactacgggcatgccccaccacgctgggctaatttttgtatttttagtagagacggggtttcaccttgttggccaagctggtattgaactcctgacctcaggtgatttgcccgcctcggcctcccaaagtgctgagattacaggtgtgagctaccacgcccagcctgtacgtacatttttttttttttttttgagacggagtcttgctctgttgccaggctggagtgcagtggcgcgatctcagctcactgcaacctctgcctcttgggttcaagcaattctcctgcctcagcctcccaagtagctgggactacaggtgcacgccaccacacccagctaatttttgtttttttagtagagagggggtttcaccatgttggctaggatggtctcgatctcttgaccttgtgatccgctcgcctcagcttcccaaagtgctgggattacagtagtgagccaccacgcccggccgtacgtatattttttaaagaaagaatcacactgcatactgtattctgcaactgaatttttcccctaaaaattttatcatgaacatcaccgcaagttagtaaagatagacctaactcattctttttagtacatacatattattctgtagtatacatgtaccataacagttatggagcaactaaatcttatccaattgatagacatccagattggttccaggattctgcatttaaaaacaatgctataactagcattcctatatataaggaactcatacgactcaacagcaaaaaaaaaaaaaccaagtaatccaatttaaaaaataggcaaaggacctgaatagacattttcccaaagacatacaaatggccaacaggtatacgaaaagatgctcaacgtcactaattatcagggaaatgcaatgcacagccacaatgagatagataccctctctcaccggttagaatggctgttatcaaaaagacaaaacctaagtgttgaccagggagtgtagaaaagggaacgcttgtactctgttgataggaatatggattagtacagccattatagaaaacggtatagaagttcctcaaaacattaaaaatagaagtaccatatgatccagcaatcccactactgggtatatatccaaaggaaatgaaatcagtatcttgaagagatatttgcattcccatgctcagtgtggcattattcacaatagtcaagatatggtaacaaaccaagtgtctatcaagacagaaaaagaaagtgtgactgatatacgtgtgtggatttatatattatatatatatagatatatcacattatatctatctatctatctatctatctatctatctatctatctatctatctagtaattccttgatatttgtagggaattggttccaggagccctctcagataccgaaatccctggatgctcaagtcacttatataaaatagcatggtatttgcataaaacctatgcacatccttccatatactttaagtcatctctaaattacttataataccgaatgcactataaacactatgtcaatagttgttatactgtattgtttagggaataatgacaagaagaagtctgtacatgttaagtacaggcacaaccatctgttttaaaaaaaataaatttggccaagcgcagtggctcacgcttgtagtcccagcactttgggaggccgaggcaggaggatcatttgagcccaggagttcgtgactagctgggcaacatggtgaaaccccatctctacataaaatacaaaaattagctggacgtgatggcgcacacctgtaatcccagctactctggaggctgaggcaggagaatcacttgagcctggraggtcaaggctgcagtgggccaagactgcaccactgcactccaggttgggcaataaagtgagaccctgtctcaaaaaaaaaaaaaatccactgaagggaaacccatgcatacagagggctgattgtacatgcacaatggaatattattccaacataaaaaagaaatcctgacattatgacaacatggataaacctggagggcattttgctaagtgaaataagtcagacaaatactgtatgacatcacttatatgtggaatctaaaaaagctgaactcatagaaacagagagtagtatggtggttgccaggggctgagaggtggaggatatctggagatacaggtatatcaaatcatcacattgtataccttaaatatrtacaattttatttgccagttataaatatgttatagttttatgtcaataaagctggaaaaaatcctctgtgtgtgtgtgtgtgtgtgtgtgtgtgtgtgtggacatatatccataagttttagtggcttttttaatgtaagattttacaatgtggaatttatggaatttatatgtttaaaattttaatagctacttcagaagggttataacattggacaatctgaaaaacaacataccatatttatttataatttcattataatttttggatctgtacctttgtttagaaaatttctctttctctgtctctgcctctctctgcgcacacacacacacacacacacaaattctcaaatttaacagctacgttgagatgtaatttacataccacaaagtttacccatttacaattcaatgacagtacgtttagagttgtgcaactatcaccattatctaacttttgaacatttttgccatcctaaaaagaaaactcatacccactgagcagtcatttctcagtcacctcctcccatcacagccctaggcaaccactaatctattttctgtctctatggatttgcctattctcggcatttcatataaatgagatcacacaatatgtggtcttttgtggctggcctctttcactcagcacaatgtttttgaggtcattcatgttgtattctatatcagtacttcattccttcttatgggtgaataatattccattgtatggatagaccacattttgtttgtccattcatgagttgatagatatttagggtgtttccactagttggctattataaacaatggtgttatgaacattcatgggcaagtttttgtgtgtacatgtttcatttctcttgagtaaatacttggtaatggaattgctgggttatatggtaactctgtgtttaacattttgagaaacttgcaaacttttttcccaagaagctaaccagtttaccatttccaccatcagtgtgtgaggattccaggttttctacatcattgccaactcttgttatgatctctttttatttatttatttttttgagacagagtttcactcttgttgccccaggctggagtgcagtggcacagtcttggctcactgcaacctccacctcctgggttaaagtgattctcctgcctcagcctcccgagtagctgggactacaggcatgcgccaccatgcccagctaatttgtgtatgtttagtagagatgaggtttctccatgttggccaggctggtctcaaactcctgacctcrggtgatttgcccgcctcggcctcccaaagtgctgggattacaggtgtgagccaccgcgcccagcttgatctctcttttttcttattgttctcttagtggtgtgaggtagaatctcattgtagtgttgcgttgtatttccctaatgattaatgatgttgagcgtctttccatgtgcttattggacatttgtacatcttctttagaaatattatatttcaggtacattttccatttttaattgtcactctttatttttgcattgcaagagttctttattctatatacacatcacttattcagtatatatatatatatatatatatatattttttttttttttttttttgagacagggtctcactttgttgcccargcaaaggcgatcatggctcactgcagccttggcctgcggggctcaattgatcctcctgcctcarcctctgaagtagctggggctacaggcacaagccagcacacttggctaatttttgtatttttgatgaaacgggatttcaccatgttgcccaggctgatcttgaactcctgggctcaagagatccacctgcttcagcttcccaaagtgctgggattacaggcgtgagccaccacgactggccacttgttcagtatttgatttgcaaacattctctctcattctgtgggatctcttatccctttctctgtggtattatttgtagtgcaaacatttttcattttgatgaaatccaatttatgtgcttttttggtggtgttgtatctaagaaggcattgcctaactcagagtcataaggattcattcctatgttctcttctaagagttttataggtttagctcctacacttaggtttctgatccattttgagttaatttttgtgtatggtgtgaaggaagggttcagctttattcttttacatgtggatatccagttgtcccagaaccatgactcaaagactgttctttccttcttggcactcttgtcaaaaatcagttgaccataatataagggtttgtttctggcctttaaattgtattctatttgtctatgtctatgtctatcctaatgctagkaccacactgtcctaattattgtaactttacaaacttactacagttttaaaactggtaaatgtgagttgaacgttgcacttctttttaaagattgttttggctattttgggtcccttgcattttcatgtaaatttcagaatcagcttgtcaatttgcaaaaataccagctgagaatttgatagggattatgttgagtctgtagatcaatttgaaggctgttaccatcttaacaatattaagttgtccaatccatgaacatgaaattttgttctatttaaatcttctttaatttcctccaataatattttgaacttttcagtgtacaagtctaggacttattttgctaaatttatttctaaatattttattccttttgctgctatagtaaatggaattgtttttcttttctttccttttctctttttttggagacagggtctcactcagtcacccaggctggagtgcagtgatgtgatcatagctcactgcaccctcaaattcctgggccttacattaaaattagcttgcaccaccacacccggctaattttttcaattttctgtagagacagggtcgcactatgttgcctaggctgggtctcgaactcctgggctcaagtgatcctccagtcttggcttcccaaagtgctgggattacagatgtgagccaccgcacttggcctgttttcttaattatatttttagattcttgatttctagtgtatagaaatacaattgattggccgggcacggtggctcatgcctgtaatcctagcactttgagaggctgaggcgggtggatcacgaggtcaggagatcaagaccagcctggccaatatggtgaaaccctgtctctactaaaaatacaaaaattagctgggtgtgatggcacaygcctgtagtcccagctactcaggaggctgaggcagaagaatggcttgaacccgggaggcggaggttgcagtgagccaacatcacgccactgcactccagcctgggccacggagcaagactccgtctcaaaaaaaaaaaaaaaaaaaacaattgatttttggatattgatcttgtacaatcttgattaacttgttagttttaatctttttctagtagagtcattgagattttttataacctagatcatatctgttaatggagacagttttacttcttttccaatctggatcccttgtatttatttttcttgtataatcatcctggctaaaacctccagtacagtgttgaataaaactggtgagggcagatatacctgtcttatttctgatcttaagggaatgcattcactctttgataattaagtatgatgttagctgtgtatttttatagatgcctctcgtcaagtggaagaagtttctttctatgcctagtttgggtagtgtttttatcatgaaagagtgttgaatttcatcagataaattttttctgcatgcattgagatgatcatgtgatttttgtgattttttaaaatttcaacttttattttcgattcaaggagtacatgtgcagatttgttacatgggtatattgtgtgatgctggggtttgatgtatgagtgatttcatcacccaggtagtgagcataatacccgatacttagttgttcagcccttgccctcctttctgcctccccctctagtagttcccagtgtctatttttcccatctttatgtccatgtgtacccaatggtgagctcccacttaaaagtgagaacatatggcatttggttttctgttcctatgttgattcacttaggataatggcttccagctgcatccatgttgctgcaaaagaaatgattttggtttttttatggttgtatactatttcatggtgtatatgtattgcattttcattatccaatccaccattgatggacacctaggttgattccgtgtttttgctattaggaatagttctatgatgaacatamaactgcatgtgtttttggtacaatgatttattttcctttgggtatatacctagtaatgggattgctgggtccaaatgggagttccatttttagctctttgagaaatctccaaagtgctttctacagtgactgaactagtttgcatttacaccagcggtgtataagcattcccttttctctgcagccttgccaatatttattattttttgacttctgaataatagtcattctgactggtgtgagatggtatctcattgtggttttgatttgcattgctctgakgttcagtgatgttgagyattttttcatgttggttggccgcttataggtcttgttttgagaagtgtttgttcatatcctttgcccgctttttaatggggctatttgttttttgcttgttgaatagtttaagttccttataaattctggatattagacctttgttgcatacatagtttgtgaagatttcctcccaatctttaggttgcctgcttactctgttgatattttcttttgctgtgcagaagttctttagtttaattagttctcatttgtcaatgtttgtttttgttacaattgcttttgaggacttagtcataaattatttgctaaggctgatgtccagaagggtatgtcctaggttttcttctaggatttttacagtttgaggtcttacatttattaataagtctaatccatcttgagttaatttttgcatatggtgataggtagaggtccagtttcattcttctgcrtatgaatagccagttatccccgtgtcatttattgaatagggagtcctttccccattgtttatttgtcctgtgttaatatggtatattacattggttgatttcagctattagacaaagcttgcattcctagaataaatcccacttacccatggtgtataatcctttttatatgtttctggatgccatttgctagtattttgttgaggatattgtatctatattcataagagatactggtctgtagttttcttgtgatctttatctggtttttgtatcaaggtaatactagcttctaagtgggcagtattcccacctcttctttttggaagagtttgtgagtgattggcattaattcttccttaaatgtttcatagaattcaccagtgaagccatctggctctgggcttgtctttgcgaatcatttgattacttagtctttttacttgttacaggcatgttcagttttttaatttcttcctagtcagttttgatcgtttgtgtcattctagcaatttgtccttttcatctatgttatctaatttgttggtctacagttgttcttagtatttctttataatctttcttacttttgtaaggtcagtagtgatgtcccctctcactcttgattttagaaatttgagtcttttttcttttttttcttggacattctaaaagtttgacaatttagtttcaaagaaccaatttttagttttgttgatttttctttattatctttccattctctatttcatttcttactgctctattctttattatttccttttatctgcttatgttgggttcagtttactcttttttccaattttttattttatttatttatttwttttttttttgagatggagttttgctcttgttgcccaggctggagtgcaatggcgtgatctcggttcactgcaacctctgcctcccaggttcaagtgattctcctgcctcagcctcccaagtagctgggattacaggcatgagccaccacatccagcctttttccaatcttttaaagtggaagattatgttactgatttgagatcttttttctttttttaatataggcatctatagctataaatttttatctaagcactacttcatatgttttggtatgttgtattttcattttcactcatcttaaaagtattttctgacttctcctgtgatttcttctttgacctattggttaagattttgttgtttaattttctcatatttgtgacttgcccaaatttcttctgttgttaatttttaatttatttattttcccaaattactttattaatttatttctttcaataaatcctaaattttcttcaaagtaaagatactttgatcttaatccttttaaatctattaaggcttatattatggcctagcatcgagtctattgtggagaatgttccacatgtactatagaagaatgtaattctcttgttgttgggtggagtgttttatacatatctgtgaggtctagttggtttgagtgctgttcaagacttctctttccatgttgattttccacctagttgtttcatccattactgaaagtcgactattgaagtcycaatattattgttgaattgtctatgtctcccttcagttctgtccgtttttgcttcatgtagttttgagctctgttgttaggttctcatgtgtttataattgcttcatcttcttgatggactgttttatcattataaaatacccctctttgtctctggtaacaatttttgtcttaaagtccattttgtctgctattggtatgccactctagctctcaggcttgccgtttgcatggaatttcctttttgtctttttccttttaaactctttgtatttttgagactaaagtgtgtctcctattaacaacatatagttagatcttgttttgttgcttttatccagtttcacaatctctgccttttgattatttaatccattctcatatgatgttattattgatatgcctggatttacatctatcattttgccrgtgtgtgtgtgtgtgtgtgtgtgtgtgtgtgtgtgtgtacatgcacaaaaaatacaaagaggaacaaaacagtaattatatgtatgtgtgtgactgttttgttcctctgttcctcctttatttgaaaatttatttttgtaaatggtctgaggtagaggttgaagtctaggttgttagctaactatcctagcactctttttaaaaattgtcctcttctactgaattgcaatacctctgtattatatatattattcccatacatagtttgatatatttatgaatttttttttttgagacrgagtctggctctattgcccaggctggagtgcaatggtgcaatctcagctcactgcaacctccgcctcctgggttcaagcaattctcctgcctcagcctcccaagtagctgggactacaggcacgtgccaccatgcccagctaatttttgtatttttagtaragacggggtttcacaattttggccaggatggtttcgatctcttgactttgtcatccacccgcctcggcctcccaaagtgttgggattacaggtgtgagccaccacacccggcctttgtttatgaaatttctattatgttctactcatgtatcagtcttctcttgtgtcaayatctgttgttttatctcagtgatttaatgataaatttcaatatctggtatagtaagttcctctttattttccttcttttcaaatgattgttcatgtgagttttgacattcaaaagaaaatactatttgtaatccttttaaaacttcatgaaatgcatgtgtgcatgcacacacacatacacatacatatacatatgcatatatttaccatctagtagcgatatgtgagaatctgggcaattcatttaaagtaaaaattcataaatagtaatattgcacattaaaatgaaacacaacaggatgatttatgttacttttacctaattattgttttctttgcagagtggatactatggaaaacagcgccatcaagatattaagagagagagtgatttcacgaaaaagtgaccttactcgtgctttccaacttcaagaccacagaaaatcaggtaacaaatttgcataacatttaccatttcttaacacaccaagttacatacagatcacttttcattttccttgcttccttaggatttcagttctccatttttactaagaaggaagaatagagataaaaataaaatataatccattatttgctcaaaaaaggcatatttctcccttttagcaagctattttcaacttggaaaactaacaacaaccctgaattaaactttttttttttttttttgagacagagtcttgttctgttgcccaggctggagtgcagtggcgtgacctcagctcactatgacctccacctcctgggtttaagcaattctcctgcctcagcctcctaagtagctaggattataggcatacaccaccacgcccagctaatttttgtatttttagtagagatgggatttcaccatgttgttcaggctggtcttaaactcctgacctcatgatccgtccgccttggccttccaaagtgctgggattacaggcgtgagccacccggccctaaacctctattctgatagtatgctagactagatgttctggagggccttcttrttaacaaacagctagattttggaggatgtagaatgttaatgcatttaccagcctcacagtaacgtgaatcttccagctgcatcttcactttccgtgaaagatgatttgaaaccacatgtgagagcatggagcaacaagaaagcacaaaagactagattttcctggggcccaatgctgatattggtatagcaatcaattctgagactaaattataatatagtaggaagatggaaaagctgaatttgagacttccatcatcatgcttggaccctcaaagtggctaaagttgtcctaagtctgtaatgctccctgactcctggcaagcaaatgcaaatttatctttgagggaagcatccctaattttggccactcacgtatccagagattaagatcaactcacatgagatcacaatcaaaaattaccaaacaaacaaggatacaaactaccatgagtgagagtcagcagaaacaacaattatttccccgaggacatcaaatattggaattagcaaataaatatgttcaaaggaaatatggaaccagaaacatgcatttgggaatgatttgaagaaaaaccaaagagatagaaaatatgcttgttaaaaaaagtaaaagcataatgaatgggttaaacggaagattagacgctactcaagaaagaattagtttaggagttataaacaggccaggcgcagtggctcatgcctgtaatcccagcaccttgggagattgaggcgggcagatcacatgaggtcaggagtttgaaaccagcctggccaacatggtgaaaccccacctctactaaaaatacaaaaaaaaacaaaaaattagccagccatggtggcaggcacctgtaatcccagttacttgggaggctgagacaggagaattgcttgaacccaggaggcagaggttgcagtgacccgagaccgcaccattgcactccagcctgggtgacaagagtgaaactctgtctcaaacaaacaaaaaaagagttatgaacaataaaatgagaagttgaacatacacctactcagagtactgggaggagagaatagaatgtaagagaccatatatttgacatggtaatggctaagacatttccagaattgataaaagactcaaattcataaagaggaacagtgattctcaagtagaataaatgaagttaaatccagacctacacacatttgttgtgaaactccagagcaccagtagcaaagaaaaaatctttaaaaagcaggcagagaggaaacacatattgctacaaagagataacgattagactgatagatttctcaacagttgcaaaattagaccatagaatcatatacaccaaacattggaaattaaatttagaaaaacatataccatgaaaacactaacaaaaacaaagctaagacagctttattagtatcaggcaaagtagactctaaggaagtatatattactagaaataaaaaaggacatttcataatgataaaatattaattatgccaattgaatccattctaaatgtgtatgtacttattcatatagcttcaaaactattcaaaacaaaaattgacagaataaaaagtagaagtagaaaaatctaccacgatagagggaggttttaatactcctctctcaggaactaaaagaacaaacagataaaagattagcagactcttttttttttttttgagatggagtcttgctctgtcgcccaggctggagtgcagtagcatgatctcggctcactgcaacctccgcctcccgggttcaagcaattctcctgcctcagcctcccgagtagctgggactacaggcgtgtgccaccacgcccagctaattttttgtatttttagtagaggtggggtttcactgtgttagccagaatggtgttggtctcctgacctcgtgatccacccgccttggcctcccaaagtgctgggattacaagcgtgagccaccgcgcctggccagcaaacttttttcttaaaagactacatagaactctgtacccaaatttcagaatgcatattcttatcaagcacaaatggaccatttacaaaaagtgaccacacactggaacataaagtgaatctcaataggttttgaagaattggaaacattacagaataaagtctctgacatatacaactccgtaacataagatagtaataaaatcaccctttggcttggaaatgagaaatatacttagaaataatccttggctccggccagacgtggtggctcatgcctgtaatcccagcattttgggaggccgaggagggtggatcacgaggtcaggagatggagaccatcctggctaacacagtgaaaccccgtctctactaaaaatacaaaaaattagccaggcgtggtggcgggcgcctgtagtcccagctactcgggaggctgaggcaggagaatggcatgaacccaggaggcgcagcttgcagtgagccgagattgcgccactgcactccagactgggagagagagcgagactctgtctcaaaaaaaaaaaaaaaaaagaaataatccttggctcaaagagaatcacaatggaaattagattgctgaaactgaatgacaatgaaaatacaatgtattagaatttatgggatgcaaattagagaggcattgatgataaccttaaatgtaaaagatatgattaacaaagtaaaaaaaaaaatttgtttttgttttgttttgttttgagatggagtctccctcagtcacccaggctggagtgcagtggcacgatcttggctcattgcaacctccgcctaccaggttaaagcaattcttctgcttcagcctccccaagtagctgggactacaggcatatgccaccacgcccagctaattatttttgtatttttagtggagacaaggtttcatcatgttagccaggctggtctgcaactcttggccttaggtgatccacctgccttggccccccaaagtgctgtgattacaggcatgagccactgtgcccggccaaaaaatggttctttgagggaactgttgaagttgacgaaaccatggcgagagagagagagagagagagagagagagagagagagagagagagaaaacaaataaccagtgcaagtgtagggaggagctgctgtctaaggctgagagagaggacccaaggaaggaaaaacttggaagggaccccctactcccaatcaagagatgagatcaagccctcattggtgaggatgtggctatggtccactggatagggcagaagttcactgaggtgcctcaagttacagttgggtctccggctggtgggccaggactggagaggatggagccacccactgaggtgccagcaagactctctttgggctgtgcaccaccgcgtctcccacacactaatggtgaggaagccatgggctgtggtgtcagtgaaatttactagaaggtgggtgccactacattttccacacatgctaaccgtgcggtgctgtagaaacaagaagcaaggcacaccagaaccagaaagaaaagctttttcttttgctgttctttgcagtgttcttcctgcactgtctactaacagagactaacgttatacgagctgccaaagaggaaatgattacagggtccagctctagtatcacaaaatgtgcaaaaaaaaaaaaaagactagttttggagctaagtaggaataaattgatagctggggtagccagcaattagcttttagataacaaaaatcttaaaagataccattcacaatagataatcaagtactgtgggagaaacctaatgaatgaggtatgagatttctttttttttttttgagacggagtcttgctctgtcgcccaggctggagtgcagtggcacgatcttggttcactgcaagctstgcctcctgggtccatgccattctcctgcctcagcctcccaagtagctgggactacaggcgcccgccaccatgcctggctaattttttgtatttttagtagagacgggggaggtatgagatttctaagatattattaagataaaggggactgaaataaatgggtgggtattactgtgttcaaggactataagggttgaagttgtcaagatacaaattcctcccaaattgagctatagtttcaatgcaatctcagtcaaaatcccaaggtggggatttttcagtagatcttgagaatctgtatctaaaagtcatgtggaattacaaaaggccccaaatagccaagatgttcctgaagaaaaagaacaaggtgggaagactttccctattatatatcaagatctattataaaagtacagtaattagaatggtatgcaattggcacaagaatacccatatagacaatggaagcaagtagagaatcctgaaacagattcatgcatatatagacacttgaaggtcccactgctgagcagtgggcaaaggagtcttttcaataaaygatgctgggccaaatggatatccctataaaaatagaaacagcctatatgtaataaagatatttgtgttttgaaaaattacatatattaggaggaaaagaatattagttgtgaaatgacaggtgaataatacatcttttattctttgtattcttttgtgtttttcaaatcttctataataagcaaacctaggccgcgcatggtggctcacacctgtaatcccagcactttgggaggctgaggtgggcagatgacttgaggtcaggagttcaagaccagcctggccaacatggtgaaactctatctctactaaaagtacaaaaaaattagccgggtatggtggcgtacacctgtaatcccagatacttgggaggctgaggcaggagaatcacttgaacccaggaggcggaggttgcagtgagctcagatggcaccactgcactccagcctgggtgaaaagagccagactccttctcaaaaaaaaaaataaataaataaataagtaagcataccttactttgttaatcaaaaaaaaggaaaaaaaaaatctaacacgtgaagtctgatttcttacaggtgacaggaaggacacgatctgtggaacactgaagatatccttgagttagttctccttcagggctgcagggcctgggaggataaattatgagggagagcagctggccccatgctgccctggctctcccaaggaggttgcattctttaaaatcatattttaayaaatcatttgggctttgttattgttgttgttaggaaaactttctgtgagccagtgggctttttgcatggagaacattttggggctgaacttaccatggagatccctcagttcgaatctggtaaacatagaccaaaatggaaacgttgaatacatgtccagcttccagaatatccgcattgaaaaacctgtacaagaggcaagtgaaacatagccccagctaaaacctagccagggtgaaacataacttagtcctttgaaaagctgggagtggccgggcacagtggctcacgcctgtaatcccagcactttcggaggccaaggcgggcagatcccgaggtcaggagttcgagaccagcctgaccaacatggtgaagccccgtctctaccaaaaatacaaaaatcagccgggtgtggtsgtgcccacctgtaatcccagctactcaagaggctgaggcaggagaattgcttgaacccaggaggcggaggttgcagcgagccaggatcgcaccattgcactccagcctgggtgacagagcgagactccatctcaaaaaaagagaagctgggagtgggataatctaatagatggagtggcagtcttaggaaaagccgaaggggaatctcccaggtacactgtggtctgttcagcaaatttgtgtgttcccaggataagcaaaaagaaaaaagaaaaagcttccacaagcaagtccacatcaaatactggatttttttttgtaagtgctgtctagcagaaggggagatatgacatccatgcyttttgtttgttttttgaggtggagtctcgctctgttgcccaggctggagtgcagtggtgcagtctcggctcactgcaacctctgcctgccacgctcaagtgactctcctgtctcagcttcccaagtagctgagattacaggcgcctgccaccatacccagctaatttttatatttttagtggagatggggtttcaccatgttgaccaggctggtcttgaactcttgacctcaagtgatctgcccacctcggcctcccaaagtgctgggattacaggcatgagcccctgtgcctggcctgacatccatgcttttatacaacataccatttctaatacttaatgtattgcttgttaagcctgagtgtacagacttgctgacatgacccagaatatgtctgaaagagttttgaaatgtagaatcttttcttagaatgtgaatatcagggagatttatcagatccccatacttattagttaacaattcatcagcagttaaatatgacattgagctgaaaaggagctggttggagctaggacttgggtgatcatttgcagtgaagatgagacgttaagagcagagagaagggaagtaaaggtaggttagagactaaagtatccccaggaaggaggcttttgacgtcacttcagaggcagtttaccatggtgactaagatcacaggccttggcttcaggcagccgagatttaaatcccactcaccagctctgtgacccttgggaaagttcctttatctccctgttttcaaatttgtaaaatggacataataatagttctgttcttgttcattcttgttgtagaggaccgaatgaaataatccacataaagttctctgtaaatggtggctgtgttagttactgctgccttattcattttggccctgtcccctgaggatcacagactgaatgaagagggtggggcctccaagggaagtctggccttctcagatttctgtctaaatcacatcatttcaattgttgatgatgttttctgtttgttacatttgctaaaagcgatcagtgtcatgaattcaatatgttctaacacttagaaaatctttattttaggctcattctactctagttgaaactctgtacagatacagatctgacctggaaatcatatttaatgccattgacactgatcactcaggtaaataaatgaacttggatgagtccatttaaaaagtgtatgtgtgtgtgtatgttggrgatacaaaatgagtacactttgattgagccctataattaatatggtttgacaccttcattggtaagatggaggccttgcttatgcatactgttaaatgaaaattgtaggagcccattgttttggactaagctccttcaccaggccccaacagactagactaaaagtcaaaatggggtagcagtagtagaaagcaaaggctaatctggttctctgaaatcagaactctgattttatctattttgttcttcatctaacatgatgaaacttgaggggaaaaagaaactcatttaatattattgttatttcagtttggctgcagactctgtattcaagaccatagagtcctacagaagcctaggtagccatcagtcaaactgaaataactttttataaatcaccagcacaaatgaaaagatgatttactatccatttcagtatcttagttactcatggccataaaaatcattcctagaaatctgattctgttttggggagtaagggctatgaaaagtcattttctgcttttttttttttttttttttttttttgcgacagagttttgctcttgttgcccaggctggagtgcaatggcgggatctcagctcaccacaacctctgcctcccaggttcaagcaattctcctgcctcagcctcctgagtagctgggattacaggcatgcgccaccacaccctgataatttttatttttagtagagatggggttctccatgttggtcaggctggtctcgaactcccgacctcagatgacctgcccacctcagcctcccaaagtgctgggattacaggcgtgagccactgcgcccggccttctgcctttagctttgatgcacaattacttattttcaaatttttaaaaactcatcagataatcccctaatgcagagacctttgaacaccgaaaaaaaaaaaaaatcaatgatcaacacattaaagtaaatgattgcctgtgaaaaaggcagcaccattgtttgtaatcctcttattgactcccaccgtatcttctccctctgctttgatgtcatcctcctctctgccctccttccatgcacctcacctttctattttaggtcttgtaatttctataccacatttagtcccatagtccacaaccccgtccccatttcttcactgtttgctcattctggctttagaataagttcaggatcccttggtagttgaaagtgagatattgtttcttacatttatgatcttactcttccatatccttcagtatcttcatgattaggcagtttagtgagtttctaactggggctatttaatcagtgtgggttccccaacccttgccttaggtgggtcttaaaatgaacactcacarccttctcctatattcttttaggcctgatctccgtggaagaatttcgtgccatgtggaaactttttagttctcactacaatgttcacattgatgattcccaagtcaataagcttgccaacataatggacttgaacaaagatggaagcrttgactttaatgagtttttaaaggctttctatgtagtgcatagatatgaagacttgatgaaacctgatgtcaccaaccttggctaaacacaaatgagagcttccctcaggctccctgaaacagctaggcccaaatcacaagtacagtcctttccaacacccctgaaattcatagtcagtagcagagaaaagcagatcccaattcatcccacaaacagatgcatagtatgggttttggaagtccctagcaagctgttattggtaagattaggttaaatgtcagtaataggatttggtttcagcattagtacctacatattgccagtgagaaactgggttggacctagtggtgttgtcgtgagtgccacctaaccaggaggccagagcggtttgaaaacatcctgaaaggaactcatacagcacaagagaaaactactaagcttgacatctgtgagtgactgagggagacaggaggaataccaggttattyatggaataaagtctttccatctttaaactgtgatcttctttggagattttataagccagtgatcctcaattaagggatccacccttcagggatgagaaccatattggattcttggggggaatctgtgggagtgtattgtttgaaaaagcgtatttktgtgtgtgtgtatgttggagatacaaagtgaatacacttggattgagccctataattaatatggtttgacaccttcattggtaagatggggccttgcttatgcatactgttaaatgaaaattgtaggagcccattgttttggactaagctccttcaccaggccccaacagactagactaaaagtcaaaatggggtcacccatgctgaggtcctgtgtcatctccggccagcttcaattggcataataatgaagttccctctgccttacaacaaaaataacctgatgttaaccaatcaattatttgtttattgttatttccctgctgtcttacaaggaaggtaactttgaaacaaccagtctgctttttgtcctttggttctgctttcttcagtttttctctgtctataaaaccaacctcctctgctcagcttatcagaacactttatttttacagaaggaagtgttgcctgattctagaatcacaaacaaagccagttaagatctttaaatgttatcttttgaccaatctggtgaccataaaagggaccataaggagactactaattactcttaagggcctcttgaggaatgcaggagacgtgctgctgacccctttcaggtcccctgtcttcctcacagagtcctaggtgttgtaaataagttccttttgtgccagactctgctgtttttgcattgagacccctgaattttttggccttcaaatccaaggtaaatgccaagagtgagcatttgactttggagtactgctatgatttgaatatggtgtgtcccctctgaaactcatgttaaaattttattgccattttggccatgttgggaggtggggtctttaagaagtgattaggtctttaagagggattagtgcctttctcatgggagtaagttagcaattaaagaagttcagcccccttttctctggtgtgtgagtgctctctctcccctgctcctttcacttttccaccatgctataaaacagcatgagggcctcactggatgcagccacccaatcttggacttcccagcctccagaaccatgagctaaataaacctccattctttataaattacccagttgcaggttttctgttatagcaacacaaaacagactaaaacaaataccaagggtttgtgccataagaggacacatggcttttgggtttgcagtggatgatgagtcaccggcaggggctgcagtttcaaaggtaactgacagtagttgcagtaactgactgttactgtaggagtgagcctggctttcagaattcacagctatctatccactttatttcttctcttcttgtgtgctgaggtaagaaaaatcattagctaagttaaagggatttcagagccaaaaccaactttgctctgagagacccaagttccaacataaaaataggatccttaatttctaaagaactgagtactcttggctttaggctgcccctttgttagtggttctttccctcccatggacagctataggtttcctatttgtcatgtttttgtgttctgagaacttggtcaaccaaccaaaaggttgggagttgccaagaatatggctagacagaaatgtgggttgcaccttatttgtgactagcatactgactgttatgtctaaatctttctttcttttggctgtctttggtagtctggattttgatctagaaagattaataagaaacataatggacaccccaagttctaatgcatgcaaatatagtccccctttagggactccagacagctatgtattcaaacattatggtccattcttgtgcacgtttttaaacctatgggcagattataccaaagacttggccaggcacggtggttcacgcctgtaatcccagcactgtgggaggccgagacaggtggatcacttgaggttaagagtttgagaccagcctgaccaacatggtgaaaccctgtctctactaaaaatacaaaattagcccaacatggtggtgcacacctgtaatcccaggtactcgggaggctgaggcaggagaatcacttgaacccaggaggcagaggttgcagtgagccaaggtcacaccattgcactccagcctgggcaacaagagtgaaactccatctcaaaaaaaacaaaaacaaaaaaagattataccaaggaccatttggagttccagtggtctttatgtggactgttcaagcctcccaaggttgtttttattcttttattttttttatttttattttttgagagggagtctcgccctgtctcccaggctggagtgcaatggtgcaatctcggctcactgcaacctctgcctcccgggttcaagcaattctcctgcctcagcttcccgagtagctaggattacaggcgcgcaccaccacgcctggctgatttgcatctttagtagagacggagtttcaccatgttggccaggctggtctcgaactcctgacctcgtgatccactcgcctcagcctcccaaactgctgggattacaggcgtgagccaccacgcccaacctctttttattcttagaactaaattagcagactgtagctatagggttaaagtctgaatgggatgtatataattgattagcatgtagaggcttctaagctctctttctctctgtcctcccctgcctacttagaatctgctgacatttttgcttggttacctgcccaggattccaaaatagcctttttaaaagcttcattgcaaagagctaatgaaaggctagaaatggaagatatcccccacaccaaggatggtaaaactgatgtaactcctactgctcctctctatcctactttgcctgaatatttagtctattaatactctgtctgaattgcccttcttctgtggaaaaaaaaaaaaaaaaaaaaaaaaaaaaaaacagttaaacagtttccttgtagcataaaaccatctgaaaattcaggagacaatcctggagtgatttacattgcctggataaaaacagctcagggccataggttaaaaattttgcaaacccagggaagacctttaatctgaagaattcacagtgtgttttttttttttttgagacgtagtcttgctcttgtcactcaggctagagtgcagtggcgcagtctcggctcacggcaacctccgcctcccaggttcaagcaattctcctgactcaacctcctaagtagctgggattacaggcacccaccaccatgcccggccaatttttgtacttttagtagagacagggttttgccatttagaccaagctagtctcgaactcctgacctcaaatgatttgcccacctcagcctcccaaagtgctgagattacaggcgtgagccaccatgcccagccagaattcacagtcttaattataacttaagatcccgggatgggggccgggcgcggggctcaagcctgtaatcccagcactttgggaggccgaggcgggtggatcacgaggtcaggagatcgagaccatcctggctaacatggtgaaacccgtctgtactaaaaatacaaaaaaaaaaaaaaaaaaaaaagccgggtgtggtggcgggcgcctgtagtcccagcaactcaggaggctgaggcaggagaatggcgtgaacccgggaggcagagcttgcagtgagccaagatggcgccactgcactccatcctgggcgacagagcaagactctgtctcaaaaaaaaaaaaaaaaaaacaaaagatgccgggatacctgatctacaccaactaatttacatgttggtgggatctggaaagcccaaaaatagatgaaagaggcagaatggtattttcctaagagttatattagtgacctgacaagccccacctggtccatttacgggtcagacaaaccctgaaagattgcaaatgaccttaggaaagctatttccaaagtatttcagctctatggcaaccaacaacctagaatgacttgtgggcctgccccagggcattccaataagcaacccctaaaactgcggtttcgaaaaactagttgtcatttgtgcaaatgatcaaaacattgaaaaagggactgctcccaaagaacttgagagaagcccttaaaaacaagctgcctacctctgatcatctctatgttaaccaccaagactgacaggcctccgaagacagctctggtaagtttctactggttagtttttgccctgtttgttaaaaagctctgccctgaaggcaatgatctaagtaaggaacaggattttgaaattctttctaagagaaatttatatctgtaaaggaaatctccatttgtaaggctatctccctctctgcacctaaaccattagaaacttttacaatgagaaaggcactggcttaaaagcttgcatatcaacgtttacctttgtttaagttgcttttcctgtccatctttttttttttctgagatggagtcttgctcagtcgcccaggctggagtgcggtggcgtgatcttggctcactgcaagctctgcctcccgggttggttcaccccattgtcctgcctcagcctccccagtagctgggactacaggtgccggccaccatgcccggctaattgtttttgtatttttagtaaagacggggtttcacagtattagccaggatagtctcgatctcctgacctcgtgttccgcccacctcggactcccaaagtgctgggattacaggagtgagccaccgcgcccgaccgggcaaatgaatcttaatgaaagcaataagatctgcttctttctgtgtgtatgtttgtatatctatgtgttatgtgtatctgatattttcataccaaaatatataaaagagctctatttaattggcttaaagaaaaagtgtttaaagtcattaattataaagcaagcatatttttcccctaaatttactagtcaaacaagcttattacctcttagatgtataataaagctataaagccaaccaaagagcaaaatacatgaaaaaaaaaaaaatcttgatacctatcagtcatggtgatacagaagggctgggctcctggctaaacccaacccataagcctggaaccttggccctaagtgaaaacagctgaccccgtttttttccagccaaatgttgccgtttttggcctgccctgcccctatcctttgccgatgaaagacttcagctggcagagcaacacaagtggctgaatgtcaaggatacaagcagctgagtggtgagcagagaagcagtgcgcgtcagagactatggatagacacggctaacttcaggcggtgcggcttcggagaggagcccagccagagacggccgggcttcagggaaagatcaccctcccatcccctttccagcctccctttctgctgagagccacccaccgctcaataaagtctgcattcatcacctttctaacagttcatcggacatgaacccaggttctgagagggcagggtttgccaccctgaccctccactgacctggttggcacttggccatccccggatggcagaactgaaagagcattggtcgtaacatgcttggacgctgctgcagggcccacaagagcctgctcccaccagagaagagtgaccagtcggtcccaggattcatttgctctggttcctgcactcactcgcttgcacgctccctcctgccaagagtagccagtgcgggctgagtggaatgagctactccagtttccgcccacgaaggagttcaagagaactaacccgtcccaataggaaagggaaaaaaagcagagtggaagaaccatgtttaacctattaatctttttgcttctgtaatacttagagtttcctgatttttttgaaaaataacttgaggtgatggctagctttgcttaatgaacaactcaagcataattgttaaaaatgagtaaattaggtgtatgtaaatggtatacaaattgataaatgaacttttcagttttgaaaaccttttacagtaacttaaagtcctgttatgattaagtaatattcatgaactgtctgagtcatttccaattaagttagaatactg

SEQ ID NO: 94292 - DNA, 33090 bp, Homo sapiens
ccgcatcctatccacctacctacctgcgttcacataggctaaaccatgacaaccaaaacaaggagaatatttgtacctttacatgttcctcttgattttggaacaagtcattccaaataccatcagctcaaatgactggattttctaatggctattcaaaatttatctaggttaagaattgaaaactgttatgtaaacctattataaaactcattcacttttaaagcagatagctgagaaaacaacgtagacactccatttctcacacctgatctgctcaattaccctgataatttaaggctaaagaaattcttttgacttgaatctaaagtgctaatcccagtgtttgcttcattctcatttcagagacataaactgtatatcaatgtagggtctcttttcaagatgtgaaatgcttatgcagcatttaatgtttgtaaatgtcattcttttgcataatacttagatcacatatatgatgatctttaaaattcggtgactgaagttcctgtataaaaagatttgattatcttttgaaccttgcagacccttacttttggtgatgtggttgctgttcgccactatgagaaggcataaaaatgttcctggtcggggcttggaagagctcttcagtttttctgtttcctcaagtctcagtgctatcctattacaacatggctgatcattaattagaaggttatccttggtgtggaggtggaaaatggtgatttaaaaacttgttactccaagcaacttgcccaattttaatctgaaaatttatcatgttttataatttgaattaaagttttgtccccccccccttttttttataaacaagtgaatacattttataatttcttttggaatgtaaatcaaatttgaataaaaatcttacacgtgaaattttgttgttgtttctaatatcattaatctggctaagaattctatattagacaattttaagtaaaatagtcactcttatagcataaagtaaggctgaaaaaattagcactttgtttaaaatactaatttaaaaaataagcaaaagccttagaaaatacagaaatgccacagttttggttgagccttccatgaagaatctgtgatggtaaaattcatttggccaggacccagagaagccttgtatagtgggttgggctacggaagtggtgtcgttttttcctttttttgagacaaagtttcagtcttgttgcccaggctggagtgcagtcatgcgaactctgtctcccgggttcaagcaattctcctgcctcagcctcctgagtagctgggattacaggtgcccaccaccatgcctggctaatttttgtattttttagagatggggtttcaccgtgttgaccaggctggtcttgaacttctgacttcaggtgatccacccgcctcggcctcccaaagtgctgggattacaggcatgagccactgcgcccggtggaagtagtgtctttagaagaaacggtttgaagaaacaaaatgatgtatatcaaaatgtcttattaaaaggtaaatataatcaaaatatcatgtaatcaaaatttcttattgaaaggcaatagagaaagggagtgaattttatcctggattataaaaaatgtttctccagacaactaaactgagttggataaagtcaatgagagtgcaaatggagtgctgtgcataaagacactcaaaatttcggggtggtggagyggggcggggagaagaaagggaaggtgattgagttgaccaaaccaaattaaatacttgtttgtatctggctggggtctgaatttgtgaaatacaaacaaacaaatattttacatatttcatcatttacaaaatgctttttatacattttctcaaccatacaatgtttagcaagaaggcaggtattatttatttttactttaccaataaggaaattgaaggttagatttgcatgtccaagttctcatgtgtagtaaataatattgagagctggaaatcttgcaatatttctctttatttcctctccaaaattaatatttcagctaacttttcttctgaaacaaaaacacaagattttattctccccgatcattccttttctttgttagcctcttgggaggctagggaggtaaatatatttcagcacttatatgtaatactgtattcatttttaatcagccctgtgttttagtaagtttttataaattaattcaaagttcaattaactggccaggcacagcagctcacacctgtaatcccagcaccagcactttgggaagctgaggcaggtggatcacgtgaggccaagagttcaagaccagcctgaccaacatggcaaaaccctgtctctactaaaaatacaaaaattagccaggtgtgatggtgcatttctgtaatcccggctactcaggaggctgagttagaagaattgcttgagccgggaggtggaggttaaagtgaggcaagactgtgtcattgcactacagcctgggtgacagagagagactctgtctcaaaagaaaaaaaaatgttcaattaacttacagctataagtatgagaaaattttcttttttttttttttcctaagagatggggtcttgcttagctgcccaatctagtctcaaactcctgtgctcaagcaatcctcctacttcagcctcctgaatagctgggactactggcacataccactgcactcagtttacccgtctttaaaagcatgaaacacaacatgaacaggttgttggctccaactgttctgacagccaccatctctgcttctggtggagggctgtttaacaactggatttcagcctacactctaccagaagcccagattctggcctctctcttattaaagatacaaagccaaagatagagatttatctttagctcattaaaatgaagccaaataacactggcaccagtttccataacaactgtctcccagagtgaagaatgaaaaggtttttgggtggcctaaatgggaaacaaagatgcaatggtctgaaagatcaagggttgcagtggtagaacaaatgattttaagagggaagataattaacatgtttgcttcctaagtttttctgggtagtcgcaaatcatttttcttcaaaccaaattctatttcacactgtcaatctgtcaatgcactaacttttctggtttgccgtctttgttttgtttcttaacatagttaagaaacataattaaaggaaaggaaaaatgaccaagaccaaaggcaatttgaccaacaggccctggaagaacatttctgaaatgatacgaaggtctcaatgatacaaactaagctaaggctgttttgtgaagcttctgctcttctttcatgtgatttccctcacccagatatacacactcacgatgacatatttgtacacgtggcacatggagacctacaaatatatgcccatggttgagatatgcctgtagagatgttggggcactgtagttttttgttttttagtgagtattaagaaaaaaaaaaagaaagtggagtgagtagaaagaaggatggtgtttcctaccctactaatttataatatagtgtactttttaggatttcacacattttttgagtttcaaaatgtgtacgccttgttttatgcttagtgaaaaaatattttgcccccagttttctccagtagagtatattgaaattggaaaaaaaaaaaaaaggagtgaaaagagctatttttataatttctccttctcagagctttaaatgtgtggactaaaaactcatgagttgttgtgttactcctcacagtcgttttctctcaccagctcaccagttttttctggctccattttctcccatattatagaggttgtgaactgagaaactccagggaccatcttgtcctccactggaatgcactttggttcttgcaagcttttgaatcatccaaaagctgaagcaggacttcggctgccctggcaggacttgaaactgtaacacaaaagtacctgagacaggtctcaatcaatttaggaagtttattttgccaaggttaaggatgggccagtgacacagcctcaggaggtcttgacatgtgcccaaggtggtcaggatacagcttgcttttatacattttagggagacatgatacagcaatcaatacatgtaagatttttacattggttcgatctagacgggcaggacaacttgaagctgggcggggggtgggtgtttccagatcacaggaagatttaaacatgtcctgattggcaattggttgattgaaaaagttattatcaatagaaaggatgtctgggttatgataaggggttgttagacccagattttgtcacacagacgaagcctccacgtagcaggctttagagaaaacagatcttaaatgtttcttatcagacttaaggtctgtgttgatgttaattacgcatgtccaacccccccatcccctttttcatggcctgaaccagtctttcaggttaaattttagagtgccctgactggggaaagagtccatacagatggtcgtccattcagatggttgtggggggccttcaaattttatttttggtttacaaaacagaaaatggaagcaccttgcttcccacttcaaagcccgtttcatgacacacactcccattaaattacatgggatacaaaacaaagctttctatgctgggaaagaaatacactctacaacatcttttttgaggttagtaattatggaaagcattttcttctgcaaaggaattccacgccctataaatttaaattattagcttgtcatctccaagagatcagcatcctcataaacggtgagagaaggaacacagaatacaggatccagcacagtttcgggattctggcttctttgccagacttatctttgcttacttctttgtatagacttacttctttgccagacttatctttgcttacttctttgtatagacttacttctttgccagaagtatattcaaaaaagttccgtggaagcatcaaatcaaccacctctacttatgatttccatgcatctctggaatgcataaagcatgatttcagaacatgttctaattctaagacccttctcttcccggcagtttaaaaaaaacaaaaaacaaaacgtcgtatctttgagcattggttttcaaacatcacaatcactttaacatgacctgaaatgcttgtgaaaacacaaactgctgggctccagcaggtttctgactcaacaggtctagggtggtgcctgggaatttgcatttctaactagagttcccaggtggtgctaatgttcccagtccagagacttcaattcgagatccactgcagtatccataacttttgctgatttccttcagatcatgatacttcagggctctctgcatcacctctactgaggagccctacccattaaagctggggtaggttggcccaagaatggaaccgggatcgttgagatttcagcaccccagcattttttagtgactgaaataatgaaaattctgatcaggctcctgcttgcttgcacattttaaccactcgctttttgcccaatattctccttgtttccacaatataattataaactgctgaggtactgcttcctcgtcaagaacaaagaggttaacttcagggtcacaaaaatgtttgcagaagggatgaatacctccaagggctttgcaaccagctgcggatgcctggacgtctaattgctcaaaggtgttatctgagactgaagaaacagacttttcccctggattctttgaaaatccccctctcttattctctagcagaataaaaactccctgctttttcctttttacacacggatttgagagatcttgttctccctccttctggcttttactaaattgaatgtctttctctatccccaagcaccagtatgtcagtgtttgacatcaactgcaccactgatacacgagtcggaatttgagcttctacaagtacattccttcctaggccaaacactgacgctaagaaatacgagaacagatcatcgctaaacagcagctgaaggtcaggcgaactgactcgctgcggaatctgcctttgcacgtgatcagtcggacgtctacacccgcagccgtcttctgtctccgcctcaccctcaggcctgacggtccgagtggagctgcgggacagcccgaacctccaggtcagccccgcggccctccatggcgctggtgcgcgcactcgtctgctgcctgctgactgcctggyactgccgctccggcctcgggctgcccgtggcgcccgcaggcggcaggaatcctcctccggcgataggtgagttgtccgcgacccttctcttcccagccggcaaagagcgcggagcggcggcgcctgcgcacagcaggagaaagtgcgtgggggcagctgcccccggcagaggctcgggctagcggggcccctgacgcgtccggcgttgaccacggctggtgggcgcggggagggcgaccaagggactacagcgttagggcgtccagccgggaggccggggctgggcgggggaaatgccctcgccggtgggggcgctccaagggcgcgtcggccggatttcgccagcctggcttttgtttacatcctgcatctcagttgttttgytccttggggaaggaaggaaaagctgcgggactcaagggaagaggaagctgggagtccgatgtccagcacagcaagaggcccctaatcggtcctgaatggagggggactgcagtttccccaccagctcagggaagtaaatttcagcgtgactcacactatcttctgtcttgctcgaccgagatcagtggctttttctgccactcacccagccagagcgcgaaagcaccctcgggtagactcaccccttagtctaccgtggaactcacggggacttcatttcacctggatgtccactaggtttcctgcgggcgggacccattttattcactcccagcacttaacacagtgcccgttacagtagtgattctcttaagtgtgccctggaccggtggcagcagccgccgcacttaaaattgttagcattgcaaatttccagcccatcccagacctactgaatctgaaacgccggcgttgggcttccacagtatgctgtttaacccaccctccgcatgattcctttcggctaagtttgagactcactggtccagaatagatacattttggtgggagattgtacaatgccatccgagcctccagttccaaaaatcaaggtgcccycacctcctcaactccctttaaaaataattgcactgttaagaggaaaaacaaaattagagaagtggggttctgttttcttttaggggagagttgtccctgagactcggtagcagcacctagtgctgaaacctctttcgctccctctgtgctttctcaggacttgggagcgctctagggcaaatatcttctctttgaaggccaagtcctcacgactcagctgtcaggtctgaagcaaaaactgtaaatctggtttccgaactgtggcaaatgtcagtcattacaagaaatttccccaaaatgtttatgtatactggtttctgcttttattacggcttagcttgtgttcctttaattatgtgaccggttagggttttgaaataaaatgtctcacgttgcttgaggccacacaatggcaaattcacctgtgttttaaagaggcctgaatgagsgctttctggggactctgtgagtcttcacacctcctgtttgggaaactgcaaggttgaatcccctcctactaaaggggaaggaagaggggttactggagttcagtggtctgaagtgttactggagtcactggagttcgaaagtctgaagtgttactggagttcaaaggtctgaagtgttcactcagcagtttcacaattctccttgtttgtaatattttgcgtattttccacttgatgtgacaactctcctgcctcctctcagccccamatgcttggacttcctttcagcatccaccctgcctggctactgctttcttgttttgtgtttttgcgtttaaattcccagtcttagttttctgccctgtcaagtcctggtggtcggacgacagaagttctaggaagcttcacctgtgtgtttttggctacagttctttagattgagtaggctgggactggcttgtgtattggtactgttaaagcaaactaaatacggcctgagaaggactccttacttctatatttgaatccttgtgaatgaactgtaacctagcttaatagtcagatgagactgaaaacctaacttaagagtatgcactggtaacaatagctaagtttggccaatcccagcagccatacttcaaccattcatatactgctgagtgttcaaactatgttcaaataaggcataaggcgagctgaattatgtctgaactatggttcattggattcttgagaagttataaaatattttggattaaaagattttctggtataattttgagagtttttctagatttgctgaacacacacacatatttttggaagtctttttwwaaatttattttattattttattttattttttattttgagacagtctcgccctgtcacccaggctggastgcagtggcgcwrtctcggctcactgcaaactccgcctcccgggttcacgccattctcctgcctcagcctcccgagtagctgggactacaggcgcccgccaccatgcctggctaattttttgtacttttagtagagacggggtttcaccgtgttagccaggatggtctcaatttcctgacctcgtgatctgcccatctcagcctcccaaagtgctgggattacaggcatgagccaccgcgcccgacttggaaatctttttaaagatagtctgcagaacaggaaaacgtgctgtagtaaacagaactttggactttgaactaggaaacatggattggagtgtgggctctgccacaggccaggccttggaaacacacataggcacacagtttcgttaggagagggacatgaggcttccagatgttcattattcatgagtcccaggttaagaacctgtcagagctctgttcttggcttctgtttaaagacatctttcagtgaatttaaatgattatcccctaatttatctgtctggaatgccatgcagtagaaagatcactagactagaagtctggagagactggttccagttaagctttcattactgagtcatctgtgatcttgaggatatcatgaaatttgcctttgcctaaatgtcatcatatataaattaaagaatgtttgttgaagggctactataagtcatgcatattctagatgctggcgatataaatctaggtactaaattatatcagaggggtgtactcttaatgcatttcaggtttgggtttactgaaacagatgctgaatatgtttatagtctcttttcccctaatcttcacagtatctcgagtgtagatattgtcgttatctgttttctttcttcttcttccccttttttttttttttttagagacagggtctctgtcacccagggtggagtgccttggcccaatcttggctcactgcagcctcaagctccctggctcaagagatccttcctaagttttgtattttttgtaggcatggggtttcaccatgttgcccaggctggtctcaaaatcctgagctcaagcgatcttcctgcctcagcctcccaaagtgctgagattacaggcatgagtacccgttttcattatctgttttcatgtgaggcaagtgagattggagatatttgaatgtgaaaacacagagaggaattgtatgtggataagggcaatgtggactctggagtcagatttcctgaattcatagtttagccctgttgcagatgatagtttagatctgttgcagatgatgcatgtaacttgaatttaatctctgtgtgcttcagtttcttatctgtaaaatggagtatacataataatgagctcatacatgtgaagcataaaaaatagtactaaacatgtaataagtacttgaattttaagtattacttggaaatggggtttgaagttaaaaaaataacagtaaaactaacattgagcttacttggttccatacaccttctaagggctttacttctactaagtcacttaactctcacagtaggcactattattattcccatttcatcaatgaaataggccaagatcacatagcaagattagtgggtggtggagcttgggttggaagtcaaacagtctgactctggcctccactcttaaccacgacactgtattgtttcatgttcatttactatacccttacattctcgaaataatacaaatacatgttcacgttaaaatgattctctgggatgactctgagctatttgccatctttactttttgtgctgggtaaagtatatctaagatggaaataaagattggggtattttctgcattatggaataaaataaaattgcttttgtcagatgttttcaaatagtgactaagtgccaagtaattgaccatactactactttcttctggatcttttgtctaccatttcttagttgtgaacataaatatgtcatggaattataatgacaactatgttgggaagaracaaccaccaaaagataactcacccctttcaccttaacgtatcaactgtttcaccttattatcccagctttgggttttattcagttgtaacatattggtagagtttaaagtttgcatcctacctgtttactctgtgcttctggtgtagtacatgctactttgtcacttctgatgtgtttctagtcataatcagagtaaactcaaaaacccaaaagtgtggaaaaaaatctctttattaaaacaatttgaacatggtttataaggatcattgaatatatatatatataaatgatgtataaacaaacttggaagcccttcagtatgggagttcagatttattagctgtgtatactttaacaaattttctatttgacccagcactggtttttcaattctaaaatgaggaccataattcccagttcggagagcagttttgagaatcaaatgacatagtatatttaaattgcttatcacagtgcctggcacatagaaaatacttaataaagagagataccactgtgattatttgttctagtattaccttcaataaaggaaactttcttggccgggtgtggtggctcacgcctgtaatcccagcactttaggaggctggggcgggcacatcacgaggtcaggaaatcgagaccatcctggctaacatggtgaaaccccgtctctactaaaaatacaaaaaattagctgggtgtggtggcgtgcacctgtaatcccagctactcagaaggctgaggcagaagaatcgcttgaacccgggaggtggaggtggcagtgagccaagatcacgccattgcactccagcactggagacagtgtgagactccatctcaaaaaaaacacacacaaaaaaaaactttcttaagatgatttccaagtaagggtgctatcaaatgggcttggctgcttcctaaaaacccaatggaagcatcctttttaacaactgcttcccttaattttattaacattttatatgagtatatgatagaagatgtacctctattaaatagcttttaagaagctttgggaattcctatttttggcttaaagcttgtattagagatttatgttctttgaattaatgttgagaggcaaggtttataagaaagtaagagtgatatatagttcctggttctgcagtctacctactcactgtgtaaccctaacaaacgacatcatatttatacgtcaatttttctacaagaagaatgtaaataatttgtaaaatcttaaactcttaaaggagacatgctattaagacacaagatgatgtcatcattggcctctccgaagggtattttcatacattttattatggaaacatagctttgctaaatattctttgttaggttatcatgctgatactaatactgagctcatcggttctttttttttgagacggagtcttgctctgtcgcccaggctggagtacagtggcacgatctcagcttaccacaacctccacctcccgggtttaagtgattctcctgcgtcagcttcccaaatagctgggattacaggcgtgtgccaccacacttggctaattttttatatttttggtagagatggggtttcaccatgttggccaggttggtctcgaactcctgacctcaagggatccacctgcttcagcctcccaaattgctgagattacaggcatgagccaccgcgcccggcctgagctcatcagttctgacacacttaagtagtaaattgttcctacagttccttgaagctcatcttctcacagagaaggactgtatttaacttcgaggcttatgaacatttaaattaccaaggctttcctccatcacagggaggaacaaccgtctctagtcttaatataaatatttttatgagaattccaaaagagaacaagtagatttatctgcattttttgtgtaatcaacaggacagttttggcatgtgactgacttacacttagaccctacttaccacatcacagatgaccacacaaaagtgtgtgcttcatctaaaggtgcaaatgcctccaaccctggcccttttggagatgttctgtgtgattctccatatcaacttattttgtcagcatttgattttattaaaaattctggacaagaagcatctttcatgatatggacagggtaagtgattatacaagtaccattaattactcaatatttatttacagtgtcctaagcttcataagagtgctgaattccataataagattagttacattttaagagttatttgagttaaaaaaacactaggtcaaactaatcaacattattagaggtaagaacaattttagaagtgtttttttttggaatacagatttcagaaatatgtcagtgttaactaagagatgaatccataaacagcacacttgcatcaatatcttgaggtgttgatattaggtcttcatgaaattatcaaagacaaaaggcaataatggaagtttacctgtcatgacaattttgtaaagcatcatcttctggcagtataactaactggttcccttcatcattatagggtgaagaggcccatatttctttacctggaataatgaccatggctaatacttgtagaatatttacttggggcttggcactgttttaattaacttatacattgtaacttatttaatttttacaatggatattattattcccattttacagatgaggaaatgaaggcactgaacatctaagtaacttacgagtatacacaactagtaattggcaaagctgggatttgaaataggcatttgggctctggttcaattggcatctgcttttaattattgcagtttttagcctcttataaatcttcagtcaggtagtgaaataggctgggatttccagcttattttttgtattatattttgttaattttcttttataggattatytgtagggtagaggtaagtgaagagtagtctatcaactctttagctgtaatctgctgttttaaaatggaagtctgcagtgataggtatagcaacgcatcatgcataagtctagtaactctttatgaaactgattttgttctttacaatctctctcttttttcagggatagcccacctcatgttcctgtacctgaactctcaacagacactgttataaatgtgatcactaatatgacaaccaccatccagagtctctttccaaatctccaggttttccctgcgctgggtaatcatgactattggccacaggtaaatttgatagactttcagaaatgcttaaagaatttttcctattagtagtgtcaaaattgtgacaataactagctagtgatagggcatgggaatgggtcttatagagggagaatatggtcttaatcctaaccatcaagaaaggcaaagacaagtacttcggggactgtaaaagtaatcttttaatacttcatgagaagttgtatcaatagtgagttttcagaataaaattatccagtttgtggatgattaatttatgttttccttcataatcttcttcaatttctcttttcttttgagtaatgttctggttcatttgcatgtccatgacaaggttagcaagtaaggttaatattgataaatatttactttttccagaattcttattagacctacaaggatgtgcataccctgatgtaagctagactgtaaataaaaacaaaaacttacaaattgccataagaagcaaagaggaaggaggtccatgttcaagtcatagtttatctaattaagacatgattcaaggcagaaaccatgttcagagcatttaatgcctgagatacccccggctcaacaggtttttatttgagaaccaacctgtgcataacagcaagatggccgtccggtttacagcatcctattgtagtagtgtaaaatcttagatttgtacccagagatttttgtttaagtccagggctgggcaattgtctcctgtggtacaaattcagcctgttgcttgtttttgtaaataaagttttattggaacacagctatgtttccattcattctacattgcttttgattgtttcatgtttcagaatagagcagttgaaatggatagaaaaagtttgctgacccctggtctagacctacccttcattttgtaggtgagaaaatgaaggctcagaaatgtgaattacttgtccaagtgctccacatcccttgggagcagagcccatacgctagatctttttacctcagatctgtgttcgcttaaaccaacatccttttgcacatcccttgccttgcctgattaacatactcaatatttcccaaacatatctactttcacrcctctctgtgtccacatttttctctttgcttagaatatcttccatctcatgtcaaatgaatgctgaacgggggttttgattatttttagttaatcraacctgaatacagtaattttgatgagttgtattctagaataagcttaagtttccagtgacttcttgtccctggcctactatcttgagatgagtaatatgtgagtccttttgagtcagcctgtcaacgagcatttgttcctgttgatatgttagaccacacagtgaagaggcttgggaacaaatgagctccagcagcccaaggtcacacacattgtgtttatatgccttaggtggcaggaagactggaatattggaaaacacaggtgttcatagtcactagaatgtaaatctttaaccagccctgctttccactccctccctctccgccaccacacctccctcccagccctgcttttaatagcttggccaactcgggtgattcacttaacctcgctgatgcagagatcactcatttgtacatagaagctagaaatacctaccttgcaaagcttttgtgagcattggtgatatgaaaaaggcatagcttactatctggcacagcatcagccctcagtaagtgggctggtggtgattgtcacattaagtggtgacaggggatacatgtttgtaactcctttgaggatttgtttgattttatttttatctctgtcctctttttgtcaagtcagatcttacaattcaaagacagaaatgctacctaacttctataacatatcctattatattaatatatacagctagggtaaattgggcagcctacatacctttaacagttaattttttttctctttctagcttatgatcttatatctaaaaatgttctttctgttattctactaccatctttccacctcacagtttcggaaatgtcaaatgtaacatgaaagctccacaacaaaatttcttagaggctgatgtctgagatctaactctggagaatgttagaaacaaataaatttcataagtgctatttttccactgaaattctatgttcatgcagcatagctacataaatatacatatacagatgcatgtccccacccatgacatcagaagtaggtatcagtgtggacatcctggagaattcttcctgttgccacccaaggaagggtccccatttactcctacactggcaagactggtgccaccgaatttgtggrtaggtcactttccattaggcttcatttctcagcagtggttatgtcacagccaaaaaggactgggaaggaaacatggtgcaatagacaattgactgtgagagtaatcatgggatttagaccagccctgagactgacacctatccctggataagccatctaacttctctggtgcttgtgtttctcatgtttaaaatagagaagaaagtctaagtgatttttacataattctaagcttctccatcaccacaccatacttggcatccatcccaaagtaaataaatggccaagactttatggctttttattatatgatgataacgatgcgtaccaattttcaatcagaatctagattggcctaagctgttgtgtaattctcagacaggcgaccctgatcttggacacaaactgaaaatacatgtttagtccaattaaaacaagtcatttggttattacttgccctatatgtatctatatgttcatcatgtattagacgcatgtatcaagaactactaggacttgggcatcttcttgaaaaataacttttgataaactcctctcagaaataggtctattttaccaatgtacagaagtaaatgaagagagtgaagaaggggtttcagtcatttaacataattttttaaaacaaaattaaaaacaattatccaattcacaaatgatttatgggtttttattcagtatttacttttttttttttttttttttgaaacagggtctttttctgttgcccaggctggagtgcagtgcagtggcacaatcatagataaatgcagcctcgccctctggggctcaagctgtcctcctggcttagcctttcaaagtgctgagattacaggcatgaatcaccatgccctgcttcagtatttaactttcttaaagttttgtttgtttgttttcctccaggcgaggctccccatttacttctacactagagcttatgtcatcctgaagatactttatgataataaaaatgttttgtacttaaaatgtgttatttaaaaaatcaaaatattttgatataatttatgctgccctaaagagacttctccaratcaaaagcatgtggttgtaaatctttattcaaagagttaagaagcttataatagtttgaacagttcagaagactttgttaaattctaaaacatgatgttttcccgttccctcggcatgctgcatcgggcagtgcatgtgcaggctcaaacctgcctttggcatctctttaatgagcacactcccacatccttcccatatcctagccatgctaaaacatgagcttttctctgtacatggtacacacctatggaactctgtgcttttgcctgtgcctatgcctatgcctatgtttgtatctgggccattgcatttgctttgatgcccttttgttaagttgataaagtccttatttaaggcctggcttaaatagtctcttcactctctaattccctgggctacacctttttktttgtttgtttgtttgtttttttgttttttgagccagagcctcactcagttgcccaggctgaagtgcagtggtgcgatcttggctcactgcaaccttcgcctcacggattccagtgattttcctgcctcagcctcccaagtagctatgattatgggtgctcaccaccatgcctgggtaatttttgtgtttgtagtagagatggggtttcaccatattggccagacacttcttgaacttctgacctcaagtgatccrcctgccttggcctcccaaagtgctgggattataggcatgagccactgcacctggcccttggctacacttgattgttcttgcttctaggctccccggacctctgggtagtgcccagcacattgtcttatagttaattggttacattttatcccccagtctccaactaagttataattccttgargatgaagtctatctaataatcatccttgcatctctagatgcctaacgtagtagtcagtgctcmagtagygtttacattaattcagctgtgtatctttaaatttcaatggtggattatattgtttgtggccaggatcaactgyctgtagtcaccagtaaagtgtacaatgcagtagcaaacctctggaaaccatggctagatgaagaagctattagtactttaaggaaaggtaagtgaaagacttagttattcctattttgcctcaatttttattcatgttatttagacttaaatttttaatgtttgcttgagtgtgccacttctggagcacagcccccagtttttgtggaggacagtgagtagtaatgctgcctgtgacacaggtcgtgaacctgtttatcttgcagggagctcttcctgtttttcttctattcttttttcttcttctactcttaattaggtaggtatgttccccatggagcaaaagctgaactttggatttgaatgtaaawaaaagtgtatgtttctaattggaaaattgattgagaagagagaatggacactaacttctaaccaagcagcacaattttataaaacaaagagctggtaaagtgaggataactaagcttttaacatggactttgaggtgcttgggaaagtaatgcataattagtgcatagtaaggccttccctgggtcatgtctaaaggccctctgctccactggctcttgacacatcattatgtaaatccctgacattttgtgagcttaactgaggtgtgcagctgttaaactaagactttggtgttttcagaatgttgagacaaatattaagttaatggctagacttctctcagttaaaatacttctttcggtatttttgttaaccctttggcttttgccactattttgttattgtttttgctagcatgcagcaaatcatagtatatatgaatttgagacatgatagcttagaattagactatggttctgattaatctagggaactatatctagtctttttttttttttttttattaagatggagttccactcttgttgcccaggctggagtgcaatggcatggtcttggctcacagcaacctctgcctcctggtttcaagcgattctcctgctgcagcctcctgagtagctgggattacaggcacctgccaccacacctggctaatttttgtatttttagtagagatagggtttcactatgttggtcaggctggtctcgggcttctgacctcaggagatccacctgcctcagcctcccaaagtgctgggattacaggcatgagccaccgtgcccggcctatgcctagtcttacacttcacatcctacaagacacrtggagagcttatgcaggttgaagggagagccataaagaatgatcaagatccctaaagaaatgctctgccttctaaggagactcagcataaagcaggggaggcagaaaaaagctgagaagtggaatgcaggccctaagaaaaagccatatgagtttcataatgatatccattccaatgatagccctcaaagatccagttaaacactggagtataatattaagttaaaartcatagaagccatcctgagaaagtcttaaaggcaaaagtgatttggggcagagatgtcttgcwtgaggggcctcaaactttgtcatcccagaggccmtagtgagacctgttgtcattttctactacttggacatgaaaggcagcttctcaaaaataacttctgacaaattcaaacccaactgacctgctagtaccataataaaaataataaggtgttrtgactacaagaaagaatagagaaaattaaaggggcagtgatccatcatgattgaaagctagggaaagccgtgcatagtgagtaggctcagggcaaagaaagctgggccagatcttagtgcccagctctgaaagtgccattgcaacagacccttgggtgtcccaycaccagttcagaggcgtgggtggaatgatgcctttaaacctcctctcccctgagattgtagcagctgtggtttgtctgacctttttttccragtagtctctagcaagatccatatgtgttaccattttttggattttatatttcacaatgtctctcatcttaagcccctaatcataaaagtagaagttgatgtgtaaatctttctttcgtaaaactcaatctcattgcttactgccaaaacacttatttatcttttcatgtgaatattggatacagctgttgttatctcaatatgttggaagtgatagcacggggcctggcaccatagcaggtttgcagtaaatgcttgctaaatctgattcttatctaatgacagcctatctatgtgcaaactaaacaatgagaaataagcaccaacctcctgactggattgtaaacctcaggaatttgctttcacaatgtttgtgtgtatgtgtatgttttcctaaatgtgttttaaaattgtttttataggtggtttttattcacagaaagttacaactaatccaaaccttaggatcatcagtctaaacacaaacttgtactacggcccaaatataatgacactgaacaagactgacccagccaaccagtttgaatggctagamagtacattgaacaactctcagcagaataaggagaaggtagatcccatagaccaaaaccatctgggaataaacggaaggcaaaatttgtatgtttattaaactcggggtagactccagtatcaataaaagtattataatttgaagattttttttgcataaacactttacaactcatggattttctttcttttttttttttttaaatttcgagatggagtcttactctgttgcccaggctggagtgcaatggcgtggtctcggctcactgcaacctctacctcctaggctgaagcgattctcctgcctctgcctccccagttgctgggattacaggcacccaccaccacgcctggctaatttttgtatttttagcagagacggggttttaccatgttggccaggttggtcttgaactactgacctaggtgatccacccacctcggccttccaaagtgctgggattacaggygtgagccactatgcctggccaactcattttagttttaaatttttttttttttcagagacaggggtctcactctgttgcccaggctagagtgcagtggtgtgatcatggctcactgcagcttcagcctcctgggctcaagtgattctcccacctcagactcctaagtaagtgggactacaggtgtgcgccaccactcctggctaatttttttttctattattttttgtagagacaagatttcaccatgatgcccaggttggtctcgaactctggggggctcgaactctgctttggcatcccaaagtgctgggattacaggcctgagccaccttgcgtagcaagttttattttgttttgcttttactgcttttaggattagtggacatctattggtataaaaagaggccaattcaaaaaattgtgactgaagtcacagttgccttatatcatcaacagtgtacaaatatagtgaccctaatagttttataatttcatctctttttcttataaatagaagagatgatatatttgctttctawattttaattaatatactttcaatcttgggtatccaaatgtcatttagttatgatgaatgtgcagaaagattctcatgaggcctttttgtgtttctttttccaggtgtatatcatagcacatgttccagtggggtatctgccatcttcacagaacatcacagcaatgagagaatactataatgagaaaytgatagatatttttcaaaaatacagtgatgtcattgcaggacaattttatggacacactcacagagacagcattatggttctttcagataaaaaaggtaatgtaatgctgtgtttgcatctccccagtctaagagtctagagcaaagcggtgaatatccagtaaatttgctgatttagtaaattaaacgttttatttaaaaatctgccagcattagccttttctgaattatcctcaatggttgtatgatgagtgtccaaatcacaacattaggcctgcagctggatttcttcaacgtaagctcctattagctccacagggccagcgttacttatttgctgtcaacacaaaagcctcagaaaccctcagctcactcaaatgttcttttaaatcttcgagtttaaagaaatatcactctattttaactgctacactcaagtttcttttgatgctacatgttttatttctcagaatttagaaagcaaagcacaatttacacaacggcttaaaataaaatatattaagctcttacttgcaagttcttattgatacatatataagcagagagaatgatacaaacaaacctcctatgtactcaacactcacattcaacatctatcaagatttttcagtttttttgttttgttgttgagacggagcctcgctctgttgccaggctggagcgcaccctgcgatctcggctcactgcaacctctgcctccctggttcaagtgattatcctgcctcagcctcccgagtagctgggactacatgtgtgtcaccacgcccagctaatttcaccatgttggccaggaaggtctcgatctcttgacctagtgatctgcccgcctcggcctcccaaagtgctgggattacaggcatgagccactgcacctggccttatattcttttaattttttgctggagtatttgaaagtgaatctcaaacactggatccattttggcactacatattctatattcattgctaaaatatatggataatttacataaccacaaacttagttaacaaaatcaacaataattatctggtatcaataacaaaaatgtccctattttctccaaattgtctctttacagttgtttcaagtcagtatccattagtgatcacatatcacttggttatgtctgttaatctcttaatctggaaactttatatttttaatatagttaaactcttatttaaaaatgtatgtttatgtgcatacgttttgttcaggaagtccagtaaattctttgtttgtggctcctgctgttacaccagtgaagagtgttttagaaaaacagaccaacaatcctggtatcagactgtttcagtatgatcctcrtgattataaattattggtaagttggcagatttcagagctgaccccatatttatgcatatctttgcagttttcattaatttagttgaatttttctcaggacagtcatgtgaratgtattttatgttgaaatctcctggcatccttcttcttttttatacttgcaatgttatcaggacttactaagtgtgagctgatgaagttagtctttggaaggctgtttctgttctgttcttctaaggacttcacatttatttagatgctttcattggttagtgccatgtttgtggacttgtatacgtactgaaatgtttcactaagccatgttcattcttcttctccagaatataagtatcaagaagagtgtaggctctgttaccattccctctcatgagccattatttctaaacttttctgtgtcccagtctatttctccatgaaatgggaattaaaatattatttaattcactgagttgctatgaggattgcatgaacaaatctatgtaaagcacttagaaaaacgcttggctcatactaaatgcttaataaatgttaacaaacaagattttattttcaagttcttgttctgttactcaggctggagtgtagtggtgcgatcatagcttacagcagcctcaaactcctgggctcaagtgatcctcccacctcagcttcccatgtaggcgggactacaggcatgtaccaccaagcccagctaatttttataatcctattgtagagatggggggggggggtctccctatgttgcccaggctggtcttgaactcttgggctcaagtgatcctcccacattggccttccaaattgctggtattacagatgtgagccactgggcacacccaaaaaatttttttaaaggaaaaaaatggtagctcacgcctgtaatcccagcactttgggaggccgagttgggtggatcacgaggtcaggaaatcgagaccatattggctgacacggtgaaaccccgtctccactaaaaatacaaaaaagttagctcggcgtggcggcgggtgcctgtagtcccagctactygggaggctgaggcaggagaatggcgtgaacctgggaggcrgagcttgcagtgagccgagattgcgccactgcactccagcctgggcgacagagcgagactccgtctcaaaataaaataaaataaagggaaaaaaattgaattggatatttgggacaaaagttctttggagcagcttcatggctccttgctttagaacaatttagcacaaaagactggccatttagcttatgggtacttcagtttgggtaacttcccctttctacaaacataatttgaaaataattcacttcaattaaagccattattggtataactgctttttttttttstggatgaatttaaataggagatggttstgttattccccagaataacagggaggaggtatggtggcagaaatctggttttattcataaatatttgattaaatgggaaaatgaaacaattgtgtgataaattagtccaaaagaattttttctacaactttcagttgcctaattttggatctgaacctcagatatatacatccacacacacacgtatatatccatctatatatgtgtttatgtatctaatacacagcatctgaggttcagactccaatgtatatttacgtgtgtacrtatgtactgatgtaggaagattctcctgatatagcactaaataatttctaaaaatataaaaataatttcttatataatttctaaataatttcttaaaacacaacaacatatatagtaagactccatttttttgaaaaagccaaaaatgtaaataagtatgcacattccaaatatttatctttgttttgatctaaagcctagatcaccacgcatacaatggagtactgacaaatgtttaacaactattcactgaggggaaatgtgccttaattggtagtgtttgccaatttccatgacagaaatactcacatcatggacaatttcaagctaccaaagtgccacagattgactagcaacattcttaaaaatttgacagtcggcttttgtgagctggtacgagctgccttcagcacaccactgatacacacaaccattagtgatggttacctctgaggatgtgtgaattgaaggttttttattttgttcacctctctttatagtttggattacatgctattatgttctttcatcatttttaaaattgaaaaagtgatacaggttttttattgagcctcccttcctccctccctyccttccttccttccttccttccttccttccttccttccccccctcctcccccctccctccctctccttctttcttatttatttattgagacaaagtcttgctctgtcacccaggctggagtgcagtggcgcaatctcgcaatcccggctcaccgcaacctccgcctcccgggttcaagsgattcttctgccccagcctcctgagtagctgggattacaggcacccaccactatgcccagctaattttttttttcttttttgtatttttggtagagatggggtttcaccatgttggtcaggctggtctcaaactcctgacctcaggtaacccacctgcctcagcctctcaaagtgctaggattacaggcgtgagccacagcgccaagcctaaaatgtcacagaaatttaaacatgaacgcttcttgttgtacaatgccttatgtgccaaaaagtgaaccaggttttgttactgttcttaactgcaggatatgttgcagtattacttgaatctgacagaggcgaatctaaagggagagtccatctggaagctggagtatatcctgacccagacctacgacattgaagatttgcagccggaaagtttatatggattagctaaacaatttacaatcctagacagtaagcagtttataaaatactacaattacttctttgtgagttatgacagcagtgtaacatgtgataagacatgtaaggcctttcagatttgtgcaattatgaatcttgataatatttcctatgcagattgcctcaaacagctttatataaagcacaawtactagtatttcacagtttttgctaatagaaaatgctgattctgattctgagatcaatttgtgggaattttacataaatctttgttaattactgagtgggcaagtagacttcctgtctttgctttctttttttttttctttttgatgccttaatgtagatatctttatcattctgaattgtattatatatttaaartgctcattaatagaatgatggatgtaaattggatgtaaatattcagtttatataattatatctaatttgtacccttgttgaaattgtcatttatacaataaagcgaattctttatctctaaatatgatgaagttttcttaacatgataatttttagttaaaatctgtgtattaactgaggtccaaattgtttacctctcatatgtaaacagatgttaccactgtttacatgcactatctactcttgggaaaataccatggtcattaggagcatgctgaaacatcacagggcatgtattgcctagctttcttcattctgagtctttggcattgctaacttttaaggatgagaatgtcacacatacttattgtatctgcagtactagcacaaggcctgggtcctagtccagtgcctggcacctagtaaataattgttgaaatgaattgaaagctgtgaatatttttcaaagaaacgtcctagattacagtggtggcattttctttgtcacagtattccaggataggataaaaatgagccttttatttaatgggattgtttttaggactccaatggctcaagctgttttctgctttcaggttaagtaggagaattaaagtagaaatggaagggagagtgggagggactgggggatttaaaggaagagaagattgtatatcccaacactggcatagtggagaagactgttaaagaaaaaaagctcatcatgacacttgttaaagatgttaaggcagatgttatccaaggtaggccctagtggtaggtatagggaccactgcaatggaatcctgcagtgagggagagagagtggactcagttctgacttcaacaaggctgagtggggatttataaccaaggagcagagtggggatcagtgaatggaaaattmccaggaggaaaaacatcaaaggtaagaggtttctggctattaccaggaggaaaaacatcaaaggtaagacgtttctggctataccaacttgataggattattgccgaaggcaggccagtgtgataggatatcaagggcggtcagataccaagggtggggcattctccctaagccaacttaacaggattcttgctcaaactggatcctgcaagaacaaaggaagcccaatgttggcctagtcaagcagaggaattggaggagcctgactaaagttttggtcaaaagagagagtctttgtcaagacataaaatgagcaaccttagattgaggagaatggaactcatcatccttgtgactggcttgacttcatgtattaaaatgactttttgatgtaacattgcataataatgaaaccaaattatcctgatttccagagagctaataaaataagtattacaaaacaaagatatcatatctaggaaacaatcatgattcattaggtaaactttcttttaaaatttttactttttagttttcaacaaacaaattagtatgttttaaaagtgagaatgctgaaacaaagcaaattttgttataaagtagtcacatcatttagaaaacttcatgcctgcaataatatttaaagttggtattttcagatgactagattgtgtattcatacttttttaatttttaattttcctgagtacatagtaggtgtatatatttatggggtacatgagatattttgatacaggcatgcaatgcgtaataatcacatgaaaaatggggtatctatactctcaagcatttatcctttgtgttacaaacaatccaattatactattttagttagttagaaatatacaatcttcatctattcttatacttacggacagaggttctaagaaaacaaatttgcaacatgtaggaaaatttagaaacagtgaaaagcagatatggttttagctgacttggaaaatgagtccgagcactggaaatggttgcagcgttattgtggagaaaatttctgcatctgttgggggtttggggcagtgaatatttagggtctatcctactttattctagagtttttacatttttaattacacatttttgtattcagtttactttcctcttgaaatataaatgattttaaaatctgagtgacatttagggacattatcaacagttaaattgatgtttccattgtaaaaccagagcatgttacaattatttattgtggtttatttcagattatgttcaaataaattatgaattttattatgtccacagtaaaacttatcttaatttgcctctgtttattggtggtgctttggcaaattcataaactgtatcctgtttagatatagacactgctactttgaagatggttttgaatgaacattaaccatatattggtaggaaaaaagggggccgggagcggtggctcacacttgtaagcccagcactttgggaggccgaggcgggcagatcacgaggtcatgagatcgagaccatcctggctaacacggtgaaccctcatctctactaaaaacacaaaaaatcacctgggcgtggtggcgggtgcctgtagtcccagctacttgggaggctgaggcaggagaatggcatgaacccaggaggcggagtttgcagtgagccaagatcctgccactgcactccagcctgggcaacagagggagactccctctcaaaaaaaaaaaaagtggggggagttgggggagtaaaagtgaagagaataggaaagagtctttaaatgaggcactgttttaggtgagtaggaagatttaagggcaaactataccttatttatacactctgtcacacagagagaaatatctatttgaataaattttttccattcataatggctatactctcccatagtatgaacggattggttaaattgagcaggcacccccacttcttaatatgcagtagaggcatctgcttaataaactcagctgctcttctggtggtgcctagcctaggacacaacttgaacttgtgtacagacctctaacagagcattcggtttctctgtattcttggaagatgagctgaatccttgtcacatctgtctggagtgacacttttaggcaatgagctttatgccaaaaggagaaagctggaacttcattaggctaatagtataggtaatttgactatttctggacctgcctgctgaataaaatctatgagacttgctttcattgttaaactcatcagataacaaaattataagggaagaagggaataaccttcactttcctcttgctattggagctacctataaatttcaaaataaccaaataagtgcaaatagctacattaggtcagttctacaatgttgagttgaggattaaacttgctattgcttagcaatttcatgctagggatatactaaagtgtaagctttcaaaaatatgcagtaataatcatgtataaaatacctgggttagcactgtttgtaataacaataataacaacaacaaaacatataaacctacatcaacaggaaaatggatcagtgaagtattgtttattcagaacgtggaatattatacagaagcaaaaatgaacgagaataaatgtcacaagcataataatgagataaaaacaaattgccaaagaataaatacaataaaatatcatttacaccaaactttaaaaatgcaaaaataatatatattgcttagagatagatttagacaaccaaaagaagtatgttagtaaaataaatatcaagtacaggttagttggaagatgatgaacagcatagttaattgggaagagacacataaggagatttaaatgtgtagtagctatatagatgtctgctctatttttcttaaatatgtgtattcagtattatataatcatttgttttaagggtaaacagaggtccatcctttaaaaatgattaatttcactcttgtagggagaacgatttgttgggaaagcttggagacattggagagtttaatgaaatctagctgagagcagattgtagttgggctgaggaggtggcagtggagacagatagttcggtttatgatatattttggaattagaagcagtgggatctgttgctgacatagatgtacaaaatgaaatacagagagaaataaagtttgactgttggattttttgctggagcaactggtagatagtggtatcatgagggagttaagattactagaaggattcctggggagagtgtgaagggcagagtgaaagactgagggtcttattgtgtgttacagctaacccagactacccaagaatctttctagttctttaaatgctttgctattctaattatctctaagtgggaggctttcttttaaaagtttcttttaaaaaataaatcactatcttataaaagaagcctaaccaacccagcctcagtctactatgattgtttctacaatatttaaaatttgtgccgagcacgatggctcacacctgtaatcccagcactttgggaggccgaggtgggtggatcacctgaggtcaggagtttgagactagcctggcctacgtggtgaaatcctgtctctactaaaaatacaagaattagctgggcatggtggcgggcatctgtaataacagctactcaggaggctgaggcaggagaattgcttgaacccgggaggaggaggctgcagtgagccgagattttgccactccactccagcctgggtgacaagagagagactccctctcaaaaaagcagaaaaaaaaaattgttacagataaacatgacttactttatagaagtgtaccgtctgccccatcccttctggtactgcctaaaccacgctagacaaatgctgaggagataaaggaaaggacagataagatgtttgtgtttttaaaatttgttttaattttaattattatggatacataacagttatagagtacatgtgatagtgtaatgcaagcagacaatgtgtaatgatcagatcagggtaactgggatacccatcaccttaagcaggtattatttctttgtgttaggaacattccacttctactcttttagttattcggaaatacacaacaaactattatcaactatagttgccctattttgctaccaaacactagatctcatttcttctatccaactgtatttttgtacccataaacaaaatgggtacaaaattttgtaccctcttcattctgtcccaccccaccaactacacttcccagcctctggtaaccatcattctactccccacctccacgaattccaatttttttagctctcacatatgagtgggaacatgctgtatttgtctttctctgcctgacttgtttcacttaacataatgtcctccactttcatctatgttgttgcgaatcacaaggtttcatatttttatgtttgaataatattccattgtttatatgtaccacgttttctttatccattcatccactgagaaacagtttgatttcttatcttggctaccgtgaatagtgctgtaataaacatgggagtacagatatctctttgatgcatcaatttgctttcttttgggtaaatacctagcagtgggattgctggatcatatggtagttctatttgtaggttttttttttttttttagaaacctcaatactgttctccatagtggctgtactaatttacattcccatcaacagtgtacaagcgttttacatatatgaatgaaacctctctctgtgtgtgtgggtgtgtgtatatatatatatagagagagagagagagatagctagatatgcaaaggacctgaaattatacatatgtattatatatttattataaatgtaaatagaatatattatatatttatataaaatatgcatgttatataaatatatcatatattatacaaatagatatcatatattatatataaatagatatcatatattatatattatataaatatatcttatattacatattatataaatagatatcatatattatatgatataattattatatatttatatagagcctctctctatagatgtttatatatatttatatattatattgatatatatttatatattatattgatatatacatatttatatatctatatattatattgatatatacatatttatatattatatatatttttatatttatatctaaatatttatatatttatatctttatatatttatatataatatttatatattaatataatatatatttatatataaaaatatatatataatataattttatataaatatttatatattatatttatatatacatatttatatattatatagaggctctctctgtataaatatatgtgtatatgtagagagaagttttatatatataaattatatatagagaaaggtgttatatatataaacatatatattttatagatataactcccctttttctctctatatatatgtgtgtgtatatatttatatatggaacctctctttctctctctctacatatatataatgtatattatatattgatatatctctgcatatacaaatgtatttatatatttttctatatataaaatatatttatatatgggggagttttatatatataaaatataatatataagggggtttatatgtattaatgcatgtattattttatattatactaataatatataattatatgttattaaattttatatatagcgagaaagagatggggttctcttgaactcct

SEQ ID NO: 94293 - DNA, 53609 bp, Homo sapiens
  misc_feature (1)...(53609): n = A,T,C or G
tttggaggtgactgggtgagatatgaagtttgtaaaaccgttgtgagagttcccctctctgattcaagcaaggatagggacattgcctgactttatggtgttcaccattccatgataaaatctattgaaatctcctctgaaactaagacacctgagggactatgactactgaaaaattgagttctgaaggccaacagttattctcatcactatattgccttaatgttaagataccatcaattataaaatacatcattgattttatcatagcttttcagggggagaagagaaataatacttcattaattaatttttagatcatctgatttcagaaatactgaaatgcaaaaaaaaaaaaaatcttagaattgaggaaatagttataatcaggaataatgtacttatttattttgagacagagtcttgctttgttggacaggctggaatgcagtggtgggatctctgctcaccgcaacctctgcctcctgggttcaagtgattcttgtgcctcagcctccctggtagctgggattatgggtgtgtgccaccacacccggctaatttttgtatttttgtagagactgggtttcgccatgttggccaggcgagtctcaaactcctcatctcaggtgatctgcccgcctcagcttcccaaagtgctgggattacagacgtgagccaccacacccagccaggaataatgtactttaaaactttattactgtcttagaaagttaaaaataggaaatttggtgattttacacttatattcaattaatactaattttaaggacttaatctctattcctttttcagagaataaactaattggtagcctgtaaaaatgtgtctctgggaggtagaatgtgaagcgggatgaggtcatttgttcttaatagaaatctgaacatcttaacattaagataccttctcaaaatagcaatagaagaaaatccctaaaatttgacagataacattttctaagctttttaaaaggacatttttaataaatacagctaaatttcattcttcttatattatgaaatttaatgagaaacaaagtctttttgtaggctggatttcatgttttttcctaattagtccagtacctagactagtttatcactccatatgccccattcttttcatccgatactgttctttctgcttggaatatgtccctccatgtggccactccgttctcttttgggaatcttccacgagtccctgatactgaaaccttctttggccccttggtgtttgataccacatttaaggcctttcacatattattctgtgattatttttactgattttatttccctcaaagatttaggtctcttaatgtcagcacccatttcatctgctcttgtgtatcttgtgcctttttggtgctcaataaaaatttgatgtaagcatggaattttctagaggctttgaagtggtaggcatgcctgaaatacggactggacccactctattatgtttcttctagggactgaaaagggaaacagatttgtattaggaggcacttagagtcaatatgaggaccaccctaactgaagttttaaatgtggggatgtgctgcgtgaagattagtagccttgtagcaggatgagccgtggacaaaaccccacagacaccaagatagtgaaggaagtagcttttaatcagttggaagcatcggcagtctagtgtcttaaaatccgagtttgttgagtgcacaatttctgtcccttttaagggctcacaacactaaagattttacatgacagggccgtgatcgattgagcaatctagggggtatgtgacaggggctgcatgcaccggtaatcagagtgaaacaacagaacgagaagtttcacaatgtccttccatacaatgtctggaatctacggataacatcggttgctaggtcatgggttgaattttaactatcaggctaaggtcaggcaggcccaggcctggttttgggtctggtgcctggcacccggctgcctgcctttggttttgcttccttgtttcttaaaacaggtactgagcataaaacaatatagaacaatacgggggggatctctttctctcttctctcagctttatctgcaagaccccttcaaagtaatctgcaaaatactaggcatctgggagaagtttgactaatcttgaaatataaaatcacaacctacaaagggtcctggtcagctgccactgccttcacaatgtccctgttggtctctccactggagtagtacatctgttgccagagaaataaaaatgtcagtttgtgtgttgtttttatacttcttttatggtacttaaatcatgccttgtataagaatgactttatatacttgtttagccctgtacagattagaagctcgttgatggcagtgcctgtggacatcattgtgtttgcttactaggcacrtgccttttctacggcgatagagatgaccagccgcatcacctgtgacctcagttaatgggaagcaggcagccaggctaacacatttcttcaccatctaggtagtaggtgctcataaataccaactgagtgaacggaaatgccatttaatataccgctttatgcctcacaccttaactatactatggaagaagcagatacacttcgagctctctaggtaggacagcttccacaaaatctaaaggaaaatccagtttcacttatttgatgtgattttagttggaccatgaggacctgggctgaaattaagggtcaactaagaaggtcattgcaataaagtaaagataagatctctgctatttgatttcaggcaatttagtataaatgttaactcagcaagatgaggctataatagcaccaacattgagcaacaagatctcagagccctgagaggctgagttttatcccagttgtctttggtggaacagttagttacaagatccctggtttaactgcttgataccactggatactagaagaggtgaaacagccggtaatctctaagatggtaggcctgaatagatgggtcagtttcttcatctgcaagtgtggagaggaggagtgggagaacactagaggaagtcagcccaaatattccacatgcttaaagaagacaggccaggtgcggtggctcacacctgtaatcccagcactttgggaggccaagggttgggggggggtgtgaagggtgtggatcacctgaggtcaggagttcgagaccagcgtggccaacatggtgaaaccccgtttctactaaaaatacaaagccggggatggtggcgggtgcctgtaatcccagttagttactcggggcaggataatcacttgaacccgggaggcagaggttgcagtgagccgagatcacgccattgcactccagcctgggctacaagagtgagactgtctcaaacaaacaaaaaaaaaacagaggaaaacaaaggttgctgcctgttaactttacagttaatacatgagccaggtaaatcaaggaaaaataaaagcatctctaaccctaccacccagagataatcactattataacttccctgtctactgttccaaagataggttcttgcataaataggcttacagacacatgcaaaaatttccctcaagaaaatggaattttaagtacatactgttttatgacccatgctttttcataagtatactgtgaacatcgatttatgtctgcataatattcttcaggatagatatattttttaaaaatctatgatgggacatctaggttgtttgcattttttcactttcgtaaataaccttataatgaacatgcttaagtaaatatttatttctcctgcccttgcctccttaaaaagcactgatagccgatccctgagccttcttccctttttctctttattctgcagtattttcctaaggatgggggaggcaaaaaacggagtaggtagagctaaaatctttatggggcagtgggaaaaagaaaaggctggaaacacgatgtgttaatatttcttgtcttacggctactttggatcatttccaagaacaattcctgccccttactgcctaccaacacacatgagggtctatagcaagcttgtctaactcgcagcctgtggcccaggagggctttgaatgcagcccaacacaaattcataaactttcttaaaacattgtgagattttttttgtgattttttttttttagctcatcagctgtcattactgttaatgtatttaatgtgtagcccaagacgattctaatgtgggaagacaaaagattggacacccctggtctatagcagcataaaactctgctgtttcctgcccacatctggaactccacacttaggctgtttcctttgctgtaaggcttagaaaatttatattctgtgaagacttaatgtgcaggtggttatactctgtcctttgcagtacggtgtttatgcctctgggaacagtgattttcacgtgctgtatgggtgtttgtattcaggtaagttccaggaaaatggacattcaatttccgtaagaaggttaatgtgcatagatactagacccccaccaggtgatccattataactgccccaaaacactaacacctgaaaatgcattttgtgaaaaacaaaggcaaatgcatttttaccttagaaatgttgattctggaagagttgggggcacttggtaagttgtttgtggcaaaggcaagggttgcaaagcccgtgacaggaagcagggtaggtataaagtcaaggattaagaacagtacttggcacaaaatagttacttgatgctgaatgaattagtctccctccgtcatctacttcccaggggctagatccagacagaggtcaagaagatggggcctgttgaaagttaaaggacctgccgtctgtttcttctttgaacaagtgaaaggtagtaaaaagtagatggctttctaccataggttttaagtttaagaaccctaggatggtactgtcacattctcttagggaggtcatagctgtgggaactgtcaacaggttgactcatttaaatgtgtcctacataaagcaacatcagatgagttctgatttacaagtctgccaggctggcctgtgagcctctgggcagagttcccgtcccatgcattgctgtagcctcagttcctccacatagtaaatgcccaagtacctatagaagaaatcgtgtgtgagcccacactctttttttatattttagagacggagtctggctctgttgcccaggctggagtgcagtggcrcaatctcggctcactgcaagctccgcctcactgcaagccccgcctcactgcaagctccgcctcactgcaagctccgcctcccgggttcacgccattctcctgcctcagcctccccagtagatgggactacaggtgcccgccaccatgcctggctacttttttgtattttttagtagagacggggtttcaccatgttagccaggatgggctctatctcctgtccttgtgatccgtccgccacggcctcccaaagtgctgggattacaggcgtgagccaccgcgcccggccctgagcccacactctttattcgttatgacggtgctgcaactaccaataagttgtgagggttaaatgggatgagatgtcacagtattatttgcctgttagggaggttttagggcacgcgcctcttctctccaaattggaatcacccaaagagttttagtaaatactgggcccatccagggttaattttcttctaattggtttggggtgctgcttggacagggggacttttaaaattctatactgacccaccaggactgacatgagaactactcgcttagtaactgttagaggaggcgccagctgatcaggacctaaagttcatattctttttcatctccccgttgtcgctgaagcctaccccataaacccctaccgtccctttgcccacagcagagaatttccgggaaaacgggaaaggtatgcaagcatgcccacacacgtgcacacacgggttcccaaaagacctgcgtgtggccgcaggggcctgccccgcccttctcgggccctttcaggtcccggcgcccagcgatcccaccagcacctgggtccggcgcgcggctccctccctctccgcgcccctcggggctccctgccccgcccgcgtgccccacccttcctagctctgccccatcgctgctccctgccccgcccacgggccccatcctacccccacctcgatccgyccctcgctcctccctgccccgcccaccgcgccccgtccctgtccgccccktctggctctcagcacccccaagaccggtgcgcgccccgcccctcctcctcctctcgcgaggcagtcccgacgccggaagtgcctggagcgcgcgacagcggcggggcggggcgggcggcctggaggctgtggcgcgcggccggcagagggaggggagaggccactggggccgtgttagtctgccggtggggactcttgcaggtacaggcgcggtcggggctcctcgtggagagccgggggctcctgccggcctctgactggggtgtcgttgcagggccgtccccatgttgcgttttccgacctgtttcccatccttccgggtggtgggagagaagcagctcccgcaggagattattttcctggtctggtcgcccaagcgggatctcattgctttggccaacacagctggcgaggtgagtgagccggcgggagcccgcctgtgctgggtctgctcccggggkgcccaagaacaccgagcccgagcctgttcattcgggccacaggcggccggagcctcagtttccccttctgcagacatggctggccacctgctaccccttccctgcctcccaggacggcagtaaactttaagtatatatgcgaaaggtgatgtctgtgctattttcggtacttttatggctaaagtaacagttttcacacagcttaacaccgtcacgcaatcctgcttccccaagtcttcttcactcattggtttattagttaaatgaactttttaaaaaagcccactatgtgctgctcatgagctagacataatggtagatgcagggaccctgccctaagtttgcttacagttttaatagcagtaggaagagttattgtcaaacttcagctgcaaatgtgcctgcatgtagctgccacacaggatatatttaagaacctggcttctcttgtccacgttttatagtacgggttggataaccaccctccactaaaaatacctytaaattggacaaggaaggcatgcattggattccagacagaacgtgcatgggtgttatcagcatttcttgttcacataaaacttcatcgagtataaaccagttgtacccaactttctgctgagagttattacctgccagccattttgtaaggaaaccttcacctgtgcatctttccgcctctggcttgagagttatctggccatgtgagagttgtatagagccaaatttggaaactaggtgataaggaaatcttagcaccctgcagactgtagtctgcaccatgttatctaccatgatccagtcgccagggtattgatgtctaatttttcagggccctccatgaaatctagctagtctccctccgctgccgggatgctttgaaactctgttgtggctctagagagcagcaggtggtaccgtcacagaagtaggagggaaggtagacgggaggcacatccgtgcaatcagatgggtaggcgtgatagagggcactgttacatccattttctcagtgaaggaagaagcaagggcattgtttatgggtgaagatggagaagaatatattggaagtttgaggagaaagaagaggtatgaaaaagctaacaaagcaggtggacttgggaaacctaataggattgccagtcagtgttaagacccacatgagatcggtgttattatttgagagacactggttgaataaggttgtatgtgtctctctccgttctgtttggctgtgtgggtgcaggcatggttgggtttaaccaggattgtcgttttgcaagtatgacaaagcaaggcaaagatgaaagagagttgaagttacgtgcaagaggagtgattgtgtttctgaactttgggttctaacctgatgaaggagggaagtgaaggcatgtgtggggagagggacagtgaacaggtggtagaatcaatagactgtatcctggtgaggtcaaagaattggagttgagtgttgtagagatgacctggaaagaggggtggtggatggaaagtgggaagtttaaaatggagattttggtggccctgcagttgttggtaatgaccaggccggaggtgtgaccctgggagtggctgagtgcagtagaagatgtgatcactggaggagaggtaattgagagctgaaaagccaggacatcatagctcttgaaatcaccaaaaatgatgatgagtgtgttgttagaaggcatgagcaagccaggtatccagatctttaaggaatgaggggaatggcctaggggtctgtagaggactgcaattaagacggatagcgagtggtatggtctgattgcatgtgattcaaagttaggagatttacaagaagagaagaaatggcatcaagcatcaaggaagacacctacttcatctcctagcccaaaagcagcagtacaggggctgtgggatacaaaatggccaccacctagcaaggctgcagggaagcattgtcctcaggtgagaggcacatttcagagaaaagtacgaagatattaatttcatgatgacacctgaccatgagctgcagaaagcacagaggaagggtttcagaagtaaggtatggcaggagtggtttcagaaaagagagggtcaaatccaggggatgttgtaaccaggagtgaagggtgctgtgagctgtgagataaggcagggtcatggtggcttagctgagtgtggaaatggggaggggtcttggaggagcatgtgcagtggtgaggccttttcttccttactgtcaatggttgtatagaagctgcaacggggcagtcatagagctcttgggcaacattttgaccttccaaggtgggaatttactgatgtggaaatggagatttagaatggttaagtgatatgtctaagatccatggctagtgagtgacacagctgaaactaggtgccacgtggactaattccaagcttagtataatttgactgtattacagctagctacctttttagtggtgtttgtgttcttttatttcttttttggttgtcaccttggacagccgccttctttataaaaggtaagtctcccgttgacataraagattaggtacagggttaaattagaccttgtttcacccatttattttaaaataccttgtgttcattcagacactgttgtctttttctattcttctgatagctaagtatatatgagagatggtcatttaaaaaaatttttagtagggatctaggtttattttatttttggaaatgaatttttaatttcctgccattatatctgctttgtcttaggttttacttcatcgactggcaagttttcatcgagtttggagttttccaccaaatgaaaatacaggaaaggaggtgacgtgtctggcatggagaccagatggcaaacgtaatgataatattacaaaaaaaatatgtttttattttcacaaagagtattctgtaaagcccattttcagaaaggatttattgttcttagtatacataagaattataaatatcastttgggaactttttaaaaaaaatgccttaaaatatttttatagaactcagattaattctgctatcttgtttcttggcaaagatatctcttaaataaaatctggcttcttggcaaagataactccgaagtgaaatctgatggaatatacaaaatgttttggttttgttctttccactgtcatcttgtcctgtattatttggcccaagcaccacttgccactcgccagtgagttagttcaaagccatcatggcctttttctttcacaatatattttagcatgaaatgtgtggctcatattcccttggtgcatgtgtgtttgcctcacctgggggactatcacctttgaccccataccttccatttctgtgtgtgatctttcttctggtaccctcttacgttaaagcctgttatggctctggtgactgaactctccttttccatgtaatgtttttacaatgacagtctgtattggaactgttgtacacatacaatcagcacagtaaaatgctgtaaaccctacagcttaaagttcatttgtatcattggtactttaagaaaaaagtgaaytgtttttgtaaaatatgtgttgttctttgcttaatttttctgtagataaatataaagtatttaaaaattttattggtgctttaagaaaaaaagtgaattgtttttgtaacatatatgctcctcattgctttttcttttcccccccagacagtgtctcactcttgtcgcccaggctggagtgcagtgcagtggtgcaatctcggctcactgcaaccttgggctcactgaaaccttcacctcccgggttcaagcaattcttctccctcagcctcctgagtaactaagactacaggcgtgcaccttcatccctggctaatttttgtgttttttggtagagaaaaggtttcactgtgttggccaggctggtctcgaacgcctggcctcaagtgattcgcctaccttggcctactacagtgtggggattacaggcttgaaccactgcacacggccttcattgcttaattttgtccttacataagtataaaaaagtactaaaggggatttcctagagccnnnnnnnnnnnnnnnnnnnnnnnnnnnnnnnnnnnnnnnnnnnnnnnnnnnnnnnnnnnnnnnnnnnnnnnnnnnnnnnnnnnggtgaaaccccatctctactaaaaatacaaaaattagccaggcgtggtggtgggcacctgtaatcccagcttctcaggaggctgaggcagagaattgcttgaacccgggaggtggagtttgcagtgagccaatatcgcaccactgcactccagtgtgggctacaagagtgagactccgtctcaaaaaaaaatccctgaaagcagataacttagagatgacagttgtttctgttttggtgaacatcttttccaatatttcccgataaaatacatacatgtagagatctatatataattttatcaaaagacagttatttggtgcataccattttgttgtatagctttttctttttttccgcccctcactttttcccatgtcagtgtggatagattgaccacattaatgttaattgcgtactaacccactatatttatatattgtaatttactaaacctgttgccctttggtggatatttagatggttttcagtttttggctttgataagcaatgctgtgtaaacattctgaacactgggaagaactttgccagtagctccttagattaacacccaaaatggaatttctggaaatgtcttaaacattctatgctcattctgtagtcattttgcttggagtatatgtagaatatgtgtaagattagaggacttttataagtaaagttatgagatcttgcactaaatcattcaaaaacatggaatctcaaagataaatcacaaaagtgtgcgttaaaatgtttataagtagttgtattattcattttttaaaagtctcatgtttttggacagtaaaatgtgttttttgttagataatgatcatttcaagttttaaattgtttttaagtaagaaggctgggattggttcacatctggcaaagttgcatgtgatggtgataygcagtgaaactcactgccctctttttggaaattcttaaattcttaaattgcacgttaggaagaaataatgacttgtgtggagaaaccatactagaaaattcagccacactcaaaggaagatttatgtgtgtttaatggcctcgtttcccaccatcgtttagaaacataaaagaggaataaaaagcattccaagaacaaagcagatggaatcattgcttaccttttagacatgtgataacatataattgtttatttgttgaagcctcttttgtattttctgcttgacaacagggtttcaagtctggaaactttgatgtgtaagacgttaagtgtgctacgtgagaaagtagtagatctcctataaagtttgagcacttgaaaataagcttagttaatgtaactacaatatatgcaaatatttctttttttagtttytaaaatattgaaggatgtttaggtcaaaaattgccatgatgaagatgcacttaaaagagtaaaactgggcaataagggaaatacccatttatttttctcarttgttacactaatttattctgattgttttttcttgttttagttttggcctttgctcttgctgataccaagaaaattgttttgtgtgatgtagaaaaacctgagagcttacactctttttctgtggaggctccagtttcctgtatgcattggatggaagtgacagtagaaagcaggtaattagaaaaacttatgtagtcatagggtattcatgagatttttattttttgaaatggaaacttaggagtatctgagtattgggtgtatgtgcgttgtatttaaattttggtttcagtttatcaagrtgaaattttttaatgctttcttagattttttttttccttccgataaacatctataggcatacctcagagatattgtgggcttggttccagaccactgcaataaagtgaacattgcaataaaagcaagtcatttgaatttctttgtttctcagtgcatgtaaaagttatgtttataytatgctatagtacatttaaatgtgcaatgacatcatgtctaaaaaaattaagcatgtaacttaattaaaatatactttattgctaaaaaatgctaacgatcatctgagcttttagtgagttgtgatctcactgaargtggaggattttgccttggtgctgacagctgctgactgatcagggtggtggcagcygaaggttaaggtggctgtggcaatttcttaacatcaacaacagtggaatttgtcacatcagttgactctttctttcaagaaagatttctttgtagcatgagatgctatttgatagcattttacccaaggtagaacttctttcaaaattagagtcagctctctccaactctactgctgctttatcaactaagtttatggaatattctaaatcctttgtcatgtcaacattgctcatagcatgtttaccaggactaaattccatctcaacaaagcactttctttgctcatccctaagaagcaactccttatccgttcaagtttcgtcatgagattgcagcagttcagtcccatcttcaggctctacttctaattctagttctcttgctatttccaccagatctgcagttacttcctccagtgaagtgttgaacccctcaaagtcatccatgagggttggaatcaacttcttccaaactcctgttaatgttgatattttgacttcttcccatgaattgtgaatgttcttaatgacatccagaatggtgaatcctttctagaaggttttcagtttgctttgcccagatccatcagagcgatcgctatgtcagctctagctttatgaaatgtttttctgaaataacaagacttgaaagatggccaggcacagcagctcatgcctgtaatcccagcactttgggaggccaaggtaggcaggagctcaggagttcaagacgagcctgggcaacatggtgaaaccctatcttaaaaattagccaggcgtggtagctatagtcccagctgctcaggaggctgaggtgggaggatcacctgaccctaaggaggttgaggccgcagtgagccgtaactggaccactgcactccaacctgggtgacagagtgacctgtctcaaaaaaaaaaaaagacttgacagttgaaattaccatttgacccatacgatgcagaatggatttgtgtgttaacaggcatgaaaacaacattaatcttatatatctctatcagagctcttgggtgaccagtcatgaatgagcaataatattttgaaaggaaccttttttcagagcagtgggcctcaacagtggattaaaacatttagtgaaccgtgctgtaaacagatatgctgtcatttaggctttgttgttccatttatagaacacagatgggatagatttagcataattgttaagggctgtaggattttcagaacagtaaatgagttttggattcaacttaaagttaccagctatgttaacccctaaaaagagaatcagcttatcctttgaagctttgaagccaggcattgactcctctctagctatgaaagtcctaggtggtgctatatttcactggctttaaaatacatacatacgtatacatatatatatctctatatgtatatatgttttaataaataaatagaaaatcctcgatggcatcttccaataaaaggctgttcttctccattgaaaatctgttgttgagtgtaaccactttcttcagtgatttagctggaagttctgtataacttgttgcggctttctctcagcactttcatagaattgaagagagttggggccttactctagattaggctttggcttaacagaatgttgtggctggtttgatctgtccagatcactaaaactttctccatatcagcagtaaggctgtttcacatttttattttttttgtatttactggagtagcacttttaatttcctttaagaacttttcctttgaattcacaacttggaggactggcaaaagaagcctagcttttggcctaatcttggttttcaacgtgccttcctctctaagcctaatcatttctagcttttgatttaaagtgagacagttgaacacttagaggtcattgtagggatattaactggtctggtttcaatattgttgtgtctcaaggaatagggaggcctgtgcaaaggaagagagagggaatggccagtaaatagagcagttagaacactcacatttctccattttttaaaatttatttttatttatttattatttatttttgagacggagtttcgctcttattgcccaggctggagtgcagtggcgccatcttggctcacctcccaggttgattctcctgccttagcctcgrgagtagctgggattacagacatgcgccaccacgcccagctaattttgtatttttagtagagatggggtttctccgtgttggtcagactggtcttgaacttccgacctcaggtaacccgcccgcttcggcctcccaaagtgctgggattacaggcataagcctcagcgcctggccttatttatttattttttgagacacagttatcattctgtcacccaggccagagtgcagtggtacaatttcagctcactgtagcctctgcctgcagggttcaagtgattctcctgcctcagcctcccgagaaactggaattacaggtgtgtgccaccatgcccagctaatttttatatttttagtggagacgggatttcaccatgttggccaggctggtctcgaactcctctcaagtgatttgccctcctcggcctcccaaagctctgggattatagacgtgagccaccatacccagccgaagctcaccattttatatggccatggtttgtggcacccctaaacaattataatagtaacatcaaagattactgacctcaaatcaccataacaaataatataataatgaaaaaaattgcagtattgcaaatatttcaaaatgtgacacagaagtacaacgtgagcacatggctgctggaaaaaggactccaatagacttgcttggctgatagacttgcttgacacagggttgccacaaacttgatttgtgaaaaatgcagtatctgggaagcaggatgaagggaagcacaattgaaggagatatgcctgtattttcttgttgaagcagtaaacctgaatagctaagagttttctcctctttctagtcatttcatactccaaaaatagttactgaggcacaaaaaacaaagctctagacgagataaatggtgaaatggaaaacaacctcaatttgccaatcagtaattttaaagttttattaattaatacatatattaatttccatttcatgatttatatcatctggaacttttttttgtgtctcagtaagtattcttagagtatgaaaaatgctaagttgagcattctgtctaatgctggacaggttttttctttgtccatggtcctgataatttccttgtttcataaaaataattctgcattagtgtgtrtagtcaagtaatacaccagggttgtagtgaagaaggccggaggaatcagtgggtttggctaatactgaaaacaaaaattgtttttcttttttggggaaatatgctaattttcttaccattaacttttcctttctaattaagttatactaaggtaatatcaaatgaatttgtaaatcctgaatattaattgccagctttcctaagggaagcctgaaagaattggatgacaagggtttgacctggggtttgaaattcactgtagataaaccagagtgataaatccatcatcagataatgaaggattacaaatcgttatgtgaatatgtagaatgttagagggtcagagcatatcatgtaattcctattccagcccggttatctgctgtgtgtattcccaacatactttctactaacagtttagaagtgttatgtggcgattccagggtctctcaagacagctcctttttattaaagtaggaaaaaatacttgctaaatcaccacttttttacttgcttactcatttatttccaaccttatttggagttagaattgagaaggaaaagggggtaaataagactatttcaaaaggcatggtgtagtctcaaatacctgttggattatcaaatccacaagtgtgtataagtcatagaaccaataactaaatcacatagtaggccatgcatagtggttcatgcctataatcctagcactttgggaggctgaggcaggaggaaggagtttcagaccagtctgggcaacatagtgagacccccatctctaaaaaaaaaaatgtatatattagctgggtgtggtggcttgcacctgtagtcccagctactcaggaggctggggcaggatgatggctttagctcagaaggtgaaggctgcagtgaaccatgatcacaccactgcactcyggcctgggtgagaccctgtctcataaataaaagatagtgctactcttagtagtcatatgtttggtgtgagttcttaaatgagagttaagaaatcataaattctcagtatctgagtacatatgaatgcatttcatatgctaagaaaagtgtttattaatatcatttctctaaatgtaacgtgtgcaggctgatgttttttttcccctaaaataacagaaattcctacttttcaatttcctatttgggactgttaaactgactacaactgtatagtatttgtgtcatctatttacttgataatgttgtaaaactgggtrtcttttttaaaaattagcatttttaatggcaagagaagtaaaatctttggtgtttttataatgcttttattttttcctttttagtgttctcacatcattttataatgctgaggatgaatcaaatcttctcttacctaaactacctacactgccaaaaaagtatgtatcactggtttctttgaaattaatcttgcagatttctctttcttctgcttttaacactgtgacaattttctcatgcgttttaaaatatgtatttttactaagagtattttttaccttaatctctgtttccttctagctatagcaacacctcaaaaatatttaggtaagatacgccttttcttgttttcaagtaagataatctgctattatttggaagacagaattgaaagatgacccaatttacttctatattttagtgaagaaaattctgatgaaattattaagctcttgggagacgtcaggtaaatcttacagataaataagtctaatttcttaaagttatttcatatttgaggcagttttcagaagctttaagagcaaatcctttatttgccattttatttcattgttttttgtttttgttttctttttgagatggagtctctgtcacccaggctggagtgcagtgtcgtgatattggctcactacaacctctacttcctgggcacaagcgattctcctgtctcagcctcctccgagtagctgggactacaggcacgcgccaccacacccagctarttttttttttttttttttgagacggagtctcgctctgttgccaggctggagtacagtggcgttatctcggctcactgcaacctccgccttcctggttcaagtgattcttctgcctcagcctcccgagtagctgggactacaggcacccgccaccaggcctgtctaatttttttatttttagtagggacggggtttcaccatgttggccaggatggtctcgatctcttgacctcgtgatccacccgccttagcctccaaaagcgctgggattacaggcgtgagccaccgcgcctggcctaatttttgtatttttagtagagacggggtttcaccatgttggccaggctggtctcagactcccaacctcagatgatccacccgccttggcctcccaaagtgttgggattacaggcatgagccaccgcacctggccttatcgttgacattaataccttcaaacaatatatcgaccttaatatctattattgtttttattgtgtggcctttcgttttatgaagttttaataataatatgatgtacatatgtttattttaataagttaaaggatataagtactagagtttctaaaattttaagtattcatgttttttaagcccatttaatatatttagcatcataaccatgataaaactgatggcactttgtattagttggtaaaaggattgttttgttattgagagtgtataaatatagttgttattaaaataatgtattcttattttactgtaagctgatttttttttaggctagaggaaatttgtgttctttgaaaaaaggaatragcctgatgtgactgaatattgagtgttagtggatttgatgtctcacttccctctgcaggggagctttagcatgtagattatatgaaagcagtaataatttatatctcgctttaacaatgcaatcatctgtgttgttgattggttctcagcttgttgcattgtttttaattaggcttaatattctcgtccttggaggaagctctggatttattgagctttatgcttatggaatgtttaaaattgctcgagtcacaggggtaagatttctttaacattttctcttcctaaattatttctcttagaatatactaggtacttatggaaaaagaataaaacactaggttttttttcagtttcgatttttggrattattcttaaatgttcagagactaatttcyttactaagataaaataattgtgatatgtctataaagattgggagctatttgtggaattagtcaagtttttttttctttttctttaacagaaagattagtatgatacacttgattatgatttgatgtttttctagtgtgagatgtaaaagagcttcaatttgtgattggaatgtaaatcttcagaagcattcttaagtccagtactgactgtactatagttgctacgtctcagtcttctccatagctttttcatcagactcttacactcrcaaaaggggtagaaaatattgtaggctctgtggaatatgttggttctgcagcacttgatttgagacttgggtaggggtgagggaaccaggttatttttgtggccttgtaactagaaaggtccatgcaggcagacacctaccttcatctgctacatgtgtgtggctggagctgggaatttgtttctgctttttaaagctctgagtttttgctttctgcatgataatcagcttcaacctagcagtgatactaaatatactaaggggtttgactcttttacagattgctggtacttgtcttgcattatgtttatcaagtgatttgaaatcattatcagtggtcacagaagtctctaccaatggtgcttcagaagtttcatactttcaggtgagtattggaacttgataacggtagagagtaaatrtgtatttaacaggttttatataggtttttatccacatctcactgtattgtaatratcattaaaataatgcaaaaaaatcgacttggaatttctacatcctaatatactgagtgttattatagtgaataccatattattcttcccatgctccaatacagttttcataaaaagtgttttggtggtctattaatgaccatattaatttgttgctattccagtttgactttgtaccaagtgtttgcttaggactctgtccctgataataacaaaggttaatatttattgattgtttaatatgtgccatatgctgaatgcttcagaacagttgatttgaatcttcacagcatcataataggcagatactgttattatccccattttataggtaagtacatggacacacaaatacttcagaacttgcttgatgtcacaggatgggaaagtgatgctagacaatctggctgcataatctgtgctcttaactagcacattgcatcttgtgtaaaatgatcacttaatattgggaaaatgctttattgcgtgctgtctgcattgtagattaaggaagctaactgggctcccatagagtatttagatcatagccttgccaagaaatcgaaaattttcatcttaaatatcccagccacttaagtatgtgtgaactctcaaacaaaagtagaacaaaaaagatgcaagatgcaatgtgtgtgatgtcttccaacattctctttgtattcagagcatcagagaactcttggtttactgttcactatggtaatggttgttcatatttgctcatcwtcttaaggttatgtgaaactatgatcaccaggattgcatttggattataataaaatgattcactactactgtgaagttggtaacagatcatttttaatgacaaatttattaagatacaattcatataccattgatagatattttcccaatatttatcagtagcctttaattccttatacttcctttaagtttttacatatatttgtgatttaaacatttctttgtaatactgtttcaaaataggttatattacatttattctatctacacaggaggggttgataacccagagagagtgatttgtgtatggttatgtgtaggttaggagatcctaaggctatgtgctgtttccaaaccgttctgctcaaagagggcacaattctgacatagtctttctgatacgtagtttgaccyacactctaaattacagactttgcagcaagtgcatctgatgatgactcactttactcttttgattttacagcttgaaactaatctgttgtactctttcttacctgaagtaactcggatggccagaaagtttactcatatttcagctctgttacaggtatttatttagagcttgttttatgtgaatatttrttatcggcttctaaagttctgtaaataaaaagcttcaaaattttgttttgtaaagctttctgaagtagaggtatctagtctgatagatgatcttataaggtccattaaagcaggaaaaggacatttaattgagaacctacttycaccgcaccctattttccacctccaaaagagtttaaatcttttaaaatactcccataaataaaataccatttacattataaagtattgtgggaaaaacagtcttcacatgagtttacrtttgttcataataaacccaccccaaattacctcccaattctgtaggttggtgatttaggctcagcttagccaagatgtttgggtgacctggagaaggttcagctgatcttgactagacttggtcatgccagctggtaygtgtcccttggctgtgattccttgtctctactccacatccttcatactccagcragccagcacaggcttgtccacatggtggtggtaacggggcatcgagggtgcaagtggaagtgtacaaagacttttgaggccctggagtcaacartgttatttctgctgcattccgttagtcaaagcgagactcaagggctgaagaaatggactctgcatctgactggaggggctacaaaagattgtggccatgtttttcattctaccacagtcattaatttatttgatattaaaggtttctagagatcagtatmtttttaaaattgaataattgaccaaamcagtattttgacagttagtgtagataagacatatcttatataaaaagcttggagatatttgtttcaccagataaaaatttaagaatgttttattatgaaattctaagaatcaatggaatgtttcgtagttaagtgatgaccaagctgttgtctttttctccatcttaactgagttaaaagagtgattgaggctgggcacagtggcgcacacctataatcccagcactttgggaggctgaggcaggtggatcacttgaggcttggagttcgagaccagcctggccaacatggtaaagccccgtctctactaaaaatacaaaaattagctgggcatggtgacgcacgcatataataccagctacttgggaggctgaggcaggagaatcgcttgaacctgggaggcagaggttgcagtgagccaagatggcgtcactgcactccagcctggacgacagagcaagactctgtctcgataaataaataataaaaataaaacagtgattgaaagtaaattctagatttctttgagacacttgatcataagcacatattatttagatagcaagttggtttaaatattttttaccatttcaatttttcttttttgctaatagtatataaatttgtcactaacatgtatgtgtgaagcatgggaagaaatactaatgcagatggattctcgtctcaccaagtttgtgcaggtaaagcagctgaagtttcccatggagagagttaaagaatgcatgatgtatgtctttaccttgaggtacatgagaaaaatcagtttgattcataaaaggctaagatcataatttcttwcaaatggcttcgtctgacttcaaactgcttcctcagatttgymaaaagggctcttttcccattgatacaacttaagtggggacaggattgtgaagtggagctggtggggctttggcaataagggcaggtgttagaacagctgattggctatcttctagtcactgatgttcagatgatcactttatggatttgatggaagtctaaggcaaggaaagggagtcatgctcctataattttgaataaatatgcttataatttaagaaatacatatatcacaatttttttttcacttttttccaggaaaagaacacaaccacatcagtgcaagatgagttcatgcacttgctattatgggggaaagcaaggtaataaactcagattaggtgctcctgtttttgcttcttttttaacagtaattatttatttgaaaagtagtttatagtcatagtatgtgatttttttaattgatacataatattttaattgatacataatrtgttacatacttacggggtatatgtgatgttacatgcgtagaattttttgtggggctatttctttattttgtttcttgtttgtgcttcgaaatttaaaagttgtaagtgatgcattcagatttccaatagagaagtgactaaaaatactttgtttttcattgtagtgctgaacttcagactctcttgatgaatcagttaacagtaaaggtgcagttaatgtatctatgtattcaaatggctatgaacacattcttaattttttttttcgagtggcatataatatcytgattgtatgctaaatatattttccttttttaattagggcttgaaaaagcttggccagtctatagagtcatcatactccagtatacaaaaattggtcataagtcatttacagaggtatgaaggtgacgtagaattttttggtattgtatccacacatacctggcgttggccttctttccgccgccttttcttcatctggcattctctttttaagccttttctagctaaaattgttgcatggcatttgagaagaatcttcctatacccaagattgaaagagtcaataataattctgctttatgaagtaattttccaacatcttttcaccaggctagactctatctgggtttttttcttaatcagctaagcatgaagtatattttgaaataaggcatatatcttttttttgagcagtgagattaacattttacagtttaccaagaatattgtatatttatttatttaatatcttggcaaggtgttggtgattttacacaagaggatacagaagttcagaatcagttatatggctggcccaaagttactaagtgtcggagccaagacttcatcctagattttcaaatctcatgctttttctatccatagctacttcattgaagcattttacaagtggatgctgggcgtttgatttattttgtttgatttttggttttttgttttttcgagatggagtcttgccgaggctggagtgcagtgatgtgatctcggctcactgcaacctccgcctcccgggttcaagcgattctcctgcctcagcctctcaagtagctgggattacaggcgcaaaccactacgcctggctaatttttgtatttttagtagagacggggtttcaccgtgttggccagactggcctcaagctcctgaccgcaagtgatccacctgcctcggcctcccaaagtgctgggattacaggcatgagccaccacacctggtggtgtttggtttaaattttggtatattcctttatgctgagtccctggccctaactacatcacccctcccttggaccactgtagcacccgctggactagttgggctctttcagtacacactgtcctttgaatgtattttccccagtagagctaaacatatttctctcttaaaaacttctaatgccttccgttagaatggagacctttgtgtggcctttagcatacctgcctctctgcctcgcccacactgatggccatttagtttctccaacttgacattttgtctcctgcctagggcttttgcatattcctcttgtcccaacttgttcttcacatgcattcttcagctctcagctcattcattccttcagaaaagcctttctgaatcccagattagctcaggttcttctgttatacctgcaccccatgtgtttccttcaaggcatttatagtagttggaatggtacactgtatgactatgcgatcatgactgtcttccctgttatactgtcaatgccatgagaccctttgattgtgttcaccgttatgtccccagtatatagcacggtacctgacccaaaatgggaacttaagaaatatttattgaacattgactgtgtagtagttgggtgaacaagatggctgtacaactgtcttaaaagggtcaggactaactgtggaacacaatttgatcatcttacaaaatttgatcttgtcatttgtttatctctgtagtcacattgaccagatggttctgctgcagtttttaggaacagttttgagaaataattatttctcatggaaacaaaatgaaagttactttcagtttttatttctgaaaatttagaaatattcaggcaagttagtcacttgatgatcgtcatgatactaatttatttctgctctgtttggatagtggctcrgagtctttattataccrtttgagtgaattgaaaggaatggcttcatggaagcaaaaatatgaacctcttggactagatgctgcaggaatcgaaggtagtgatttaatttctcagtgaaatacattaaacacagtttacttatttgacaaatgacgtttatttattttttccctttagaagctataactgctgtgggttcttttatactcaaggcaaatgaacttcttcagtaagtattgggagtacctggaatcactgacctaagaatatgtcacttttgacctaaataagaacctagtaagctgttatgattctcttaaaatcagtttttaaatttttatcacaattatgcctttatatggttccgaaaagccagcagcacagagaatttataaagtaaagctgtattttcctgtcctggtcatccttacctcaggtcttctcgccagagggaatcattttaactctttaactacttctatttttagttcttctatgggttacctccatatttctaaattgtatgactatgccacatttcttttgtcaatttttagaagttattctctttgttttgtttttcttagactgttaggcttgcttgttttcttgcattgtctgttttttctgcatccttccgtcctttcccttctgaagggtggtgtagtacctctggagtcccctgttccagatgccttccttagcctcccacccctctgcttcagcctgcagctgtggtccagttctcctgcacggctaccacccgggcattttcttcattactctcctgggttagacccagaactgccaggattgcctttgtttcttggcttatttaatcattttgctggaaaacatcctctagtaactttctcaaaaagcagacatagaaggtaaactttatctccttttgtgttttttctcctaccctcacacttaattgacagctggctttaggattccctgagggttattggttttcacatagaacttcaaaagcagagttccataggattctgtgctttttgttgctgatggaaggtctggtgcttctaattcttagccctttatagttttttttttttttcgttttgaaaaagctgtaaaagcattactctttattcttgatatgttgaaatttcataacagtgtttttgggtgtgggccttttaattcattgtgctataataagccattttaacctgaattctcttgtattattcttttaataatttactcctccctcttttatttactttattattatttatttatttttgcgatggggtctttctatgttgcccaggctggacttgagctcctgggctcaagtgatcctcttgcctcagcctcctgaggagctgggactacaggagtatgccattacgccaagctttctctttgttttaaactagatttttgttctagaaatctgtttggtcagatattagaatttgtggtggattgatttctgtgtcttttctttttctcttacatttttcatatctttgtctttttgattttctgagagttttttgattattgtcaaatgtcagtaaacatttgttgagcacttaactatgttttaaatacagtgataagtaatgttgagaaaaaccaagcaagaaacaaggacctagggcatgataaggtaggggattcaactttatataggtggtcagggaggcctcactgagaaggtgaagttggaaggagacggaagggagcaagccctgttgatatttgggggtggaaggggcagcaagtgtgaaggccctgagtttggagcatgcctggcatgttgcagggacaagggcactatagctgaagcagattgaatgagagtaaggtaggaggtggattgacaggtgatagaggatggccaggttgcatagagyctgtgggcagttgttaggactttggcctttactctggatgtaaagagaagcccttggggatttgggagtagtggagaggatatgatttaggcttcagaaagatccctcttgctgctcagagttgagaatagctcatagataggcaaggacagaagccaagagagaaatggtggtcagaatctgaagtggtcaggattgggatatattttgagaatgtaattaacaagattttctcaatgcttatctgtagatggtgataataagggagtcatagatagttatgagtttagggccttggtacttgaaagagtagaattgatatttactgaaagggggaacaaatgtgagggcaggtttagggagggggagtgtagagtaagatcaagagtttggtttggacatactagattgttctttagacttactattttgaagtaattttacataaaaattacaagaataatagagacaactctgctagtactcctttacttgattcatcatttaaaaatattatactgtatttatcatataatttatcttttctgaaacatgtgagagtatgttgtttatatcaggtgccttttacctggaatactttagtgcgtattttctaagaataaaattattttcttacataaccacagtacagttaacaaatttaggaatttttaacattaatacagtatattaacctacagttcaattcccctttagcagttatcccaatatgtccagtatgataagatgcagttcgggatcacgtatttgttttagttgctgtgtctctttaattttgagcagtttcttaaattttcttggtcttttataaaagttgacatttctttaagaagcacatcatgtatgtatgtatatgtatgtctgtgtatctttttttatgtttctcattttagggttatctgattttttttaatgattatatttaggttatgcatccctggccagaaatactacataattggtatgtccttctcaagttgtcatatccagcagcacacacagtgtccgtcatccacccctctcagtgatgttaatttcggccaccctgtcagtgtgttagatgtatggaatttgaaatgcccattagatctgcaggtggagctgtccagcacagtgttagttatgtgagactagcgttcaagggaggggtccaggctggaaatgtgcatttgggagccatcagcacattggtgttatttaaagccatgggactggatgaggtaatgagtgtgcacagagaacaggagtgacctgatttaagaatggggacgatgaagaactagcaaaggaaatgggagagacagaacaaccagaggagtaggcgtcctgcaggctgagtgaagaaggcattacaagaaggaatgagggattggttgacagatgctaagtcaagcaagggaaacaccaagaatagaatagagtcttagaatattattaggatagtgaccttgataagagccaccttagggagtgatgggagctggtacgatacagaataagagcagatgcagagaagacagcaaatatagcctcttgaggagttttgctgtaaagggaatggccagtagatggaagcagaattgctggggttttttcttctttttatcttgggaagaactggagcatgtttatgtatggatggaatgatctaraaggtaaaaaattgagatgagagaggagaggctataaagagtgtgagagaggtgggacctagtgcagaagggaaagggttggaaaagcagaggtaggagctcatcagttgtaggaggaaaggctgagagaggagggtcacagaggccagtgtrtgagcaggtgggagataggggacgttcccttcaaggtgcttttattatcctaacaagacatctgtcatcagctgagagtaaggatggggmkgcggtgttggaggtttaagaatacaaggagagctgtgaagcagctgtctagtccagcaggagatcgagtgcactaatggaacaggagggctctgggagtgggaaagtgaggccagccagcatggctgcaggtctgctgcaggagtggggcacagagcaggggagcagttagatttaccagacttcatgagtaaaatgaagcaagaggagcaagagaattgtagcaaggaccaggttaaaatgatggccgttgaatctgaactactttaggaaggaagtgaggacatgtaggggctgagagatggtgaaaggtagtagaaccagtagatgatgcgtcctggtgggaggaaggtgggggccctggagagaggctggacagataggagggggtgtttggtcagtgggatgcttgaaattgagacttagaagggttgcagttggtgatgacagcctctggggtgtgaactttggagtaaatgtctaaggtcgggttggaggacaggatcattaaactgaaccattctcttcaatttcttattatagcagttctttcttttaatttctcaaagtgttctcctgtttctttaatcctcgttcaaaactttgctttcgttttgtggatgtgacatctcacatctttctgaggatattaattagattgctgttccctgaattatcttcccttgatgggtcacttttctgtttatcttagtctctccttgcaaggtttctttaaataccagatgcttggttgcttactcatgtttattcaggaggcaatttaaagttgcttggaatctgtgtaggttggggcagcagggagcaggtgccagagtgtgtggagctttgcttcaggatactggtgcccacgtgaaagtgccttagctcttcccactttactcagtttctctgaggaatcctctgtttgtttttgactggagagtagccccctaggcattcttcatgttttggaggaaagaacgtattgaccactctgtgttatattttcagtttgtccccctgtgtccagccccacacatcaccctgaggtcttctgttagacctgacattgctaaggtctgagcatccctgggcttctccaaggcggaggctccttcccagctgccctctccgtgcactgcgtggcacagggcctacgctcttaagccacatcagtcacttttgctgttgagctgcatcagtcttccktcacttttgacatttctgaaatttaatttcttttctattgttctttttgtttttgtgagtttctaacacatgtacccctctccatccacagccattttaatggtattttagaaggtagaggctgtagatgtgtgtgctcagaagacaaaaaaaacacgaagagaaatggcattgcttttcctgtatttcgaagtattttttggttcaccgtatttgcagagagcagatataaaatactacgctttctatgatcacttctcagtatgaatgaaaggtagtttaacttattgttctttcaggtaagtagaattattacaggttccagatggagaaactgaggcattgagcattttgatgttggtctggtggcctggggtagggttgaacatattgactgcacaaaggaactttttttctttctcttatcattgctgcaagagggttttgattatattgcttagtaacataagagatgtttcagtcttttattccaagcgttttactttgtactgaaaggttaatgatactgacctacctcttcattggtattatgaaacttaatgcttggaaagggctttgagatttgggaatgaaaagcacaggtttttgcctagaataattatcgtatacatgtgagcttaaagagattgtttaaaaagtgataacccatgtctgtattcagaaacagttttatcaaaatgaagatgacttccatttataacacttaattttgggggtacatttgtgtaaagccaagggaaattcaacttttgagayctcaattgttaggataaaaaatcagcttccaaaaataatggtccattgatatcagaggtaatgacagcacaaatttgtaataatggttttctgttgaagttgatgttttttcttcttactgaccaatgagtattttcttttaaaatgagaataatgctgaaaactgttttttctgatttcttttatttgcaaagttagaaaaggagttcatgctttactgagtcataagaaagactattacacagtttgtggcaaggctcttgtaaccagttggaatctaagttatttgctttatttttataatcagtattttcttttttgaaattttatttttaggtaggcgtttgatttgtaatatctgctgttctaaagacttaaatgtcacccagataggataaaatagaacagtaaggattatgatatttcctgacagttgagtaggatgtatgaatcccccacayactaatcttatttctgattttttgtttttatctctttagagttatagatagtagtatgaaaaacttcaaagcattttttcggtggctttatgtgggtaagttaattgagtgaagcatttttattttaacactttaaaaaaattataggagtattatcttagactgtttcaataaatctagtacaatttcaaatactttgagagaactatataatgatccctgttgtacctttcacctagcttcagcagttatcaacacatgggcagtcttactttattcatacacccagctcaccacagaaatatttattaattttttattagtatttaataaatatacatatttttggagtactcatgataatctaatacattcatataatttgtaaagatcaaatcagtataattgggatatgtatcaccttaaacatttttccttgtgctagaaacattcctcacagaactgttaaagctaacttgtagtctgttatccctgtcgctcactgatagttcacattttttactttataatgtctccttaggttaaaataacattttaaaaaatttttgtaagtatcaggcactgttaggtgctagattttaaaagtaaaaaagaaaaaaaaataagagtctctgtccttgggtagcttatcttctgtgtgattatttcgtcttctgtctttagatctctgctgtccactgtggtagccactagcaacatgtggctatttaagtggattgaaatcctataaaactgtatatttggttccttagccatactgtccacatttgaggttctcagcagccacaaatggttagtggccacacagaagtagaacatttccattaccacttctattgtgtattgatgctccagctaaatagaatgcagaccacttacagcctgtctttgtgtcttcacaatgtctttgcatttgggcaggtagttagtaagtatttrctgacttgatattaaatgttttgtattcactctgcagtatatgcatattttatttaggtccatttatattgctatttttgtgaactctcaatatccttaaaataatccagcatctatttccctccaacaaatgcaaaatttagtgttaatgtaatttatctcacacttgttgaaactctaaagagtaaaatagaatgaaaattacctgtaatgtgctgatatcctttaaacaaatgtccagatcttcaattctaatattgtaaaaacagactatatttttcaacctaacataattgcttttgtttaaaaactgaatgtgatctgcctatgttgatacttgaaattttttgatatttctgaaaactgtaccaatactaacmagaatgaggaaccagagagcttatcaggctggcctgtttaagatccatgttgttaattggaataaattacaatattaaaactgaatgagaccttagaagactttytttttgcagaggtagtttggttttacttataattattggaggtaatttaggcagtgtctatccttactacayattctaactgtagtaagaatcaggattgtccttactacayattctaactgtagtaagaatctaactgtagtaagaatccttactacatatyctaactgtagtaagaatccttactacayattctaactgtagtaagaatcagaactgtagcactgtggtactcttattcaggattaggagagaaatggcttaccgctcggtccttctcattagggcaggacattgtagaaagcacactggattggagaagtggagatctacttgtaatcctggctctgtccccagtagatacctgtataaccttggttttcttctttgtaaaatgtaatctccatgaaggcagggatatcttttatactgatatattgctagcacctagggtatgctcaataagtagtttttttggatggataagaatgagtggaactagattttagctcccctttcagataacttagatgtttaaattaattaaaaaacagttatgtatttgcaaaagtacttctgacttgcttgttactgaccaaatgcaattaagaaccatgttcaaataccatgcagaggcacataaaacatactttgtcttgacttaggtggaacgtaatacaaaacacatagtactgatgaggacaatcctgtgaaaggacggagagagtcaaccacagatactagatcaaagaaaagtacataaatatactgtaagcgcgtagcagaaaagaccaagggaaataaacagatttctttggtatcataaggctttggaggaaaaaatggcttgcagattttaagagcagaaacatcaccaggttaaaaggagggatccttacacacgtagtcttagcacagacagcagttagatttgtctggcgtggcaacaggtggaattgaagaggaaaaagaatagtttagaatggttagaccaacaattttgaacctgaaaatatgaatcaaatttaagttctggcaccccttagtttttggaagaaaaatgtttttgttggtgaaaagctgtgtaaaattgaagatttagttcagtcaaacaccttgtctttgaaatgtatttataattaaaattatgtttgtagtttgcttttaaagatagttttttaactttgtatttccagcaatgttgagaatgacagaagaccatgtgcttcccgagctgaataaggtagtatgtactagtgcattttcacagtgttcacattgtcctgcttgaactcagctgyrctggtcattttggtactcttattcagttattagttaacaggatgtcaggatgtagrcgttagatcccttaagcaccacctttttaaaaaagaaatttgcatgttttgtgtattgtttcatctcatagaatacctttattatgactatctaaatttatagttttcatgtttggataaggttttataatacatgtaagacagcatccttgtattccttactttgacttccttaaattttaaatgcttcttattttccttggaaatcaggtgcttaratattagtccctgtgttgatgtctggtaagcaacagtttctttctaaagaaaggaaggaaggattcctgtaaggactgtgacaaccrgtgatggaatctycttccagggaagtcttacggaatagggcagaatttccacttgattcttgcagctcactcttcttcacccctgctgaaactgttgataggttaggtagttttgagcctgaaaaaatggacagcattaaaaytagcctcatgagctagatgagaaagggttcctccactttctacaactcgtttgctaagtcgatcttttgcactgtgggtgactggccttgcaaaccaggaaagtttcacaatagttgtttttctgacatcactgttagctttattttgggagtaaaatatgtcagttgttggaagggatcctaaggtataattttctgagggctgaagaactaaattgggataaattcaggtcactgcaagaagcaggagcctacactgaagcagacagcactgtttgcctgcagcccttaactaagggtgacacatcttatctggggtccagttctcatttccaaaggagggacctcagcacatgtggtcttagcacaaggcytgaaataataaacaaccttaggccataaagagttctgtagctattggattaactgattggaagatgagttcacatgtttaattacattctcggaaccccaggcgttcatattttcacagtcgcataatctatatttctttgaaagaactttgccagttttcccatggcttttagtagatagtaaaaatgtcacatttataattatgtaccatttcttttattgagcagctttcttttatcttgatttttctttttgttccttttgttgatagatgactcagaaagatatcacatttgttgctgaatttcttactgaacatttcaatgaggtaagaagwtgatatttctgtaatgcagtttaaaaaaaaattacagtaaacctggataatgacaagacataattaaatttaacccaatttaattgaagtctatagcaattacttttttaaaactgttgaactaattatgtttataaacatagtcaataaaccagacttttgtttgtgtgtcttatmatctataaaagaaaataataactgccactcacagctctcttgaaaaggaaggttttgggtttaaatttaagatatttttcttcgtgagttgacttaagaattaaactatgtttatttttttccaggctccagacctttataatcraaaaggaaaatactttaacgttgaaagagttggtcaggtatgggctttgaactcattttaaaaccttagcagtgttcatctttgttatccaaagtctctggaaagaattacaataccaagtaatacaggatctctgcccttttagtaaaattaacaaagagcagcagtttttaaacattttgatctgagaacacttttacattcttaaaaattattgaggactaaaaatacaaaaattagctgggtgtggtggtgggcacctgtaatcccagctacttgggaggctgaggcaggaaaactacttgaacccaggagacagaggtttcagtgagccaagatcaagccactgcacttcacccagggcgacagaacaagactctgtctcaaaaaagaaaaaaaaaaattatcgaggactagaaaagagcttttgtttatgtgagttgttatttattgctgataggcattattaggtattaaaaattaaacataataaaaaattattccctaattcactcaaaaatagaatataccagccaggcattgtggctcatgcctataatcccagctactcgagaggctgaggcatgagaattgcttgaacccaggaggtggaggttgcagtgagccaagattgcatcactgcactccagcctgggtgacagagggagactcagtctcaaaagaaaaagaagaagaaaaaaaagaatataccyattactattacatgttaatataaatatttttagtgaaaaataatgaaattttacaatataatttagttaagagtggtaacgtttcatattgcaaacctctttgatgtccagcctaatagaaaacagctggattctcatatctgctgctacattcagtctgtttcgatatgttgtttctatagtatcagtgtatatgaaaaaagtctggcctcacacaggtgtgtatatgaaaagggagaaatattctattagctttttcagataattgtgactttgctttattatatcaaatgtggacaagtgatagtatcttaaaggtttgtttcagtgtggaatctaaaattgcatcagtgaacgttttttacattaaaattcattcatcttcttgcactttgaacggatcttttgtccacgcataattttgtaacatcctgctttggtcatttgggaagtattggttccctgagtcatccagctgttctaaatgccgccaccttttatcaaactataagctagatttcattaatagcaccaccaatttaatcagaaaagtctttgtgttgtgaagcacacaggggcagatgcaggttttccaaaaaaaaaaaaaatttttttttttttgagacaagatatttcctctgagtagtacagtggtgcaatcacagcttactgcagcctccacctctcggactcgcctcttgtagctggggctacaagcacacaccaccatgcctggctaatttttgtctttattttgtggagacctgccatgttgcccaggctggtcttgagctcctgggctcaagtgatacgcctgccatggcctcctaaagtgcggggattacaggcatgaaccaccgtgcccagcctatttttgcttttaacataagtgcttttcctcaagataaccatcatactttgtgtagcaaaagttcctatgtataactctcaattctgtcacacagaatattaaagattcgtactcaagggttgaaaataaagttaataatttaatgacttcattaaagataaatgaaactatgagtatgtggcagaaaaagaatacagtgactgctggtatgatttgggacyactaccttgactcttggctgagacacttacagctttccccaccatcagtacaaatgttagcatagtgtaaagggcaggtgacagctacattattataaaactagtattgactttgtggatccccaaaagcatcttggggattcccaggggcttgtggatctcacttgaagaacaactgccatagagtatattgacagtacattgacaatggatacttatgaaactaatttataacttgcatatgttaaattaaaatatgctcatgaaaaagaaacacaatttaagttcgatttgtgatctctacatctacaacataataatcttttaatactttgyggtttgtttagttgcttgactaaacaaactaccaactgttcagcagtttctttaatttttaagatagtagctagctaacatttatggagggcttaattctgccacatacacatagcagattttggctacctcacttagaatgatagtaatgcactttcagaggacttggcaataaaacaaagtaacttattaagttaaaaaagtgttaaaaataaaccgattktaggccctaagtctttgatttactaaacttaacttttttttgtcttttactttttttctttttccattttcccttccaggtatgaataaacttaaatttctaattctgtatttctagtacttgaaagatgaagatgatgatcttgtgtcaccccctaacacagaaggaaaccagtggtatgactttcttcaaaatagcagccaccttaaaggtacttcatgaaccaascagattttggccatttttgtttttatttaagactaggtcttgaatagttctgctaacagttttgctgaaaacttgctgaacacttacctaagtttattagayttatatttatttgattataggaacagcaaaataaccaatagtgtatgacatcaccatgatagatagaagacactctgaagttaactacgctgtaggaagattgcttattcctaagtgttctcatataagtgttttgcaccctgtaaaaaataggattttgagggaaactatagagccaaatagtgagaaaagtcttttttgccaattccaatttattatcttctgaaagcacagggatgctcaactgtattctcctcgggttgtagttggtgtgtgtgtgtgtgcatgtgtacttgttatacctttcattttctagaatgtcagaatgttaataccgtaaagctatccagcattattagggatgcagcacataatagcaaccattaaatatgccagcacatcttaccattttagatgaaaatattttaaagctcgtatttctttgatgtctgaaagaataatctgaccagatttagcaattgcttagatctttaaggtagtgggtgcttagtctaactaaacatttatggggtgcttagtctgccatatacacacaatacctgctttaatcctcacaagattctatgggtaggtacttggtatcaccatttactaatgaggaaacagaaggttagagaagcccaggatcacacaagctggttagtgatggagctaggattctgttaatgtgaaagcctgaggttttaactagactggcagtacaggttgagcatcttaatccaaaaatctgaaatcttaaaatgctccaaaatctaaaactttttgagcaccgacatgacaccactagtggaaaattccatacctgacctcatatgatgggtcccagtcaaaatgcagtcaagactttgtttcaagcacaaaattattaaatatattgtataagatgtacatgaagcataaatgaatttcgtgtttagacttgagttccatccccaagatatctcattatgtatatgcacatattccaaattccaaaaaaatcccaaacacttacagacccaagcattttgggtaagtgaaactcaacctatagcaatttctgccacttgtatttggttgctgcttctgtgaatgaatgaatgaatgaatgaatgaatgagggagagaattctttgatgccaagaactttgcatatagtccaaattctttttcaaggcaraacctattatgtattgccagagagtcttgaggtcagtaaggagatgcattggtgcaagttggctattgaatggagggaggataaaggtacaggagacgctacttatttactgtatttaatcaggatgcccagggaataaggcaggatgtctggagagggtcagtggcagtgcgtcaagagyagtggcacctggaccctgttgctattttggctattattgatccagggaactttgccaggctaaaaataggtcctgtcctcttttatttgccccacatcttacgtgtttrtaagaaaggcctgatcttagctacagacctaatggaactcactattgagttccataatgaattctagtgaggaaatatcagtgaaactgttttcttacactgcaaaaatcaagtgctaaatacttgatctgtgtactttctttagggtacatgggtcagtattgtgtggtgggtaaaagttggtgctctgaaagctggattttctgggttggaagctgctctactacttcgtagtaacacggctgagagcaagttgcctaacctctctgtgccatagtttctcatctgtaaaatgaagatggtaataatgctgccctcaaaaaactggtgtggagattaaataaattaatctacataagcacttagactaatgcctggcacttagcacagaagcagtctgtaggttagtgtctgagcactttttactcagtgtttctgacaacaaaatgagagaaatttttttcctcctgacaccaaccaattttgacaccaacggggtgtcctacaattcaattctgacacgaattacagatagttagcgcagacctcacaggataaggatgcagtcccacaagactgccctcgcgtcaaatgtcaggtctctgggtccccacatctcttgggtagccatgcttgttgtctgacttggctataaggttaaggtcaagagttcccagaaccttcctccctttcaggttggataattttgctagaatggctcacaaaactccgggaaacatataatttttgtttaccagtgtgttgtaaagaatatgactcaggaacagccacatagaagtgctatatcaggcagggtatggagagaaaggtgcaaagcttccatgctctcccagcacctggacatattcaccacccagaaagttctctgaacctcattgtcccagtgtatttatggcggtttcattatgtagacatgattgatgaagtcattggccattggtgattgaactcaacctccaarcccctctctcttccttggaggctggcgggtggagctgaagtttccaaacttctaatcaaggcttggtctttttggtggccagcccctatcctaaagctatctaggtgccagccaagagttgcctcattaaaacaaaagatggtagtcctagcactttgggagggtgaggtgggcggatcacttgagatcaggagttcgagacctgaccaacatagtgaaaccctrtctctactaaaaattagctgggtgtggtggtgtgcacctgtagtcctgttactcgggacactgaggcaggagaatcgcttgaatccgggaggcagagtttgcaatgagctgagactgcaccactgcactccaacctgggcaacagaatgagactctgtctttaaaaaaagaaaaaaaaaaatgttcctgtcacctttatcactcaggaaattccaagggttttggaagctctgttctaggaactagaaacaaagatcaatgtttttctgtgataacatagcatctgtcaccttgagaacttaaaatgttaatgtgattgtagttcattttatccagcatggctttatctaagggagggcctacaaagcacagtggaagagggtgggcattagagtcagacttgggtttgattgacagaactagatacttagttattttcacactgggcaattgcctaaacctgttaagcttcattttttttttcatctgtaaattggagaatatggtgtttacttcatatggctattgtaagcaataaaaaaaaaaggtattttaaacacctagcatagcaggtgttagtgctaaattatatattactttctcctgataaagtaaccttttaaaaagtaaagagcttatttatatagagctagtttccagtctcttgttttagagacttaaaaaacagtactggactgctgttgttgtttcactgtggcaaagaatagaagaatgaattttatttcatcatatatttgatggttcccaaatcattccttgcttcttatagccagcagaaacctacagttggattttggtgagtctaagtttgtagtaagtgagattgtttttagtgagctgtcagcgggggttgatgaaaggcagaagaccatggyygtttttaatgaggttgtgtgaaaatccaatgaagtggtcagtgaaaattctacctcgagataaactgtgcagactggctctaacagtagattattttcttctaattataagtttgctatagcttcttttatttttgtttctgtttttgtttgaaaccagaaagtcctttgctgtttccttattatcctcgaaaatcattgcattttgtgaaaaggcggatggagaatattattgatcagtgtttgcaaaagccagcagtaagtttgaaagaaatgcatgtctttgtgtaggagcaatagtgtctacagtatgtggctcacttatgtaaatgatcttaatttttagaatgaactatgaaaatgttgatagtcaactgtttttgattaacaaaagtaacaatttcatatggttcaacctaatactccaacttaagtttcttacacacgtgtgtgtgtgtgtgtgtgtgtataaagattactgaaggtgttggcatcttgagtattttatttgttcccagaagaaattcattgtaaacagtcttagttacagagctgatgtgtctctgcttactactgaaggatgtgaatgaatggttgttatgagaccagagggaggtggtcttaaacctgccatgtgcttagcaccaaggtccttttcagctcagaattttctctttttccttactgttacaattgtcattaacgtttcttatgtacaaggtttggtgatgtaggcgatttttttaccacattcgaacagtgatggtcagtcactttctgtagagtatctgtgtgcatattaacgctctaattatattttaaaatcttattttatataggatgtaattggaaaatcgatgaatcaagcaatctgtattccattgtatagagataccagaaggtaattctgtttacctattggatggtgtaattccgcagccaatttaaatttttctcatttctttttcccttttattttagtgaggattctacacgtagattgttcaaatttccttttctgtaagtatatatttcttccctatcttgagtgaacaatacaattttgttttatccatcaatagttaaaaaatattatgacaattttttttcttaggtggaataataaaacttcaaatctacattatcttctttttactattctagaagattcactttataaaatgtgcatcttaaggagacatactgatatttctcagtaagtattaatctgaagtttgaatcaaagagataagattttattatttgtaagaatgaagcatacagccttccagcatttcagattttaaactactttgtgacttttagatgtgtcatttaattgttagttttcatgtcattaaaagggtaacactgaattaggaagttatatgatcttgttttagattatttaatttttattggcatataatcattgtaggactttttttagagttaggaaaaatatgacagctcaggatattatacttcattttttagaagttaaaaacttccgaaaaactaaaagttaaagaagttttaactttttagaagttaaaaacttctaaaagtggctgccttatagaaatgatttttgcctagggttaagtatgcttttcattaaacaagaggccttgcctaacagagacttactttgaaattgaaagtagaagktctgaaaaataaatcatatttagaacgccattggtagcttaaaaatggttttaaacctgaatttgaagaaaatgttgagaccacgatgtaaccaaaaagaaataattgggttatttctattccaaatgtctttggtgactgtgtgattttaaaccaaattggtttatctatctaggcatttaaacaagttctcagtgttctaaagaagtacatgtactgaccctgacaatcatgttcttttaagcctttagattattgactatccaggttgttccacagagtctctttttttcccccttctttcttgaagatctgtgagtaatggactaatwgctattaaatttgggagctttacatatgccacaacagaaaaagtcagaagaaggtaagtcttgaatcttgtttggatgaaatgtagatacatgtgatatgtgtatatgtttaggaataggatcagactcagttayggtggtaatataggtaaaagggctttgccacttcccacatcaagggcaggattctttgtgtatttatacatagagaatgatttgacttgtgattgaatagaaccttactgccctgcagtttatgtcgtacggtttcctataattaatactcctgagctccctgttgacaaagaaagtaatgtggttcccatgggcagatggcctgcagggctgaagttcttgttacgaccaaaaaaaattatgaggtgatgccattcttagtgatgggagattttcttaggattcaaaatggtaacagtacctaagccatccctgaggcttcgcaagggaaagaagtgactaatcataggctgatctttttctcacttttttcctcacataaaataagtttttttatgataaagtcyttggagttgctgtgcctatttttcatgtgtagtatcttatttttatttctcagtctagtcaactctgctgaatgtgtatataaggtgtcattcatagaatttccacaggcttaaggcctaaccattgatggccaggggctttctagaactgaaacaacttcacagatttttgggggtcatgattacccatttttaagatttggttatatatgtgaataatcagtacaaaaagtaactgattttaatacaaaccaatgatatattttaaatgttattgtacagaatgtcacttaacttttaaatttttttctgcttgctgccagtataacatgcatacaatattttctcagtagtcacgatcatctttgatataacaaaacttattttaattctagcatctacagttgtttagatgcacagttttatgatgatgaaactgtaacagtagttcttaaagacactgtaggacgtgaaggaagagatagactcttggtccagctgcctttgtctttagtatataacagtgaagattctgcagaatatcagttcactgggacttattctacaaggtaactagtaacattgtctttctgatattacagttaaatgtttttttaatgcacattataaattccaaccttttaggtaygctagataatggttatttcgttactagagakaaccacagaggtagctgagcagaaatgctccaatttttcattcaaaatatgctggccttaatagctttttttgtccctttgctttactagtaaatcaggaagtatttgctggaatcaaggtggggaattatttggagtggataatgggacttcttttagttacatttttaaggatagcattaaccctagttggttggaattagttatttttgatttgccttcagtattttccttccagaattaagacctcagtacccatgtaggaagtatactgtcaattccaagagatggctttaattgactgagacttaagtaagcagatctctaatttaaaaatgtatccatttgctttctttgaaagggagtcagaaaccttgctaagatgatattctgcctgtttggaattacagtatttcttttcttttttttttttgaaacagggcctctctttgtcacccaggttggagtgcagtgacgcaatcatagctcactgcagcctccaactcatgggctcaagtgaccctcctgcctcagcctctcatagctgggactacaggcatgtgccaccttgcctgactaattttatttttttacagagatagagtcttactatgttgcccaggctggccttgaactcctggactcaagcaatcctcccaccttggcctcgcaaagtgctgagattccaggcatgagccactgtgcctagccagaatatagaatatggaatttttatagaatattatatcacagctttttttctaacacaacagttgctaaaattatattggaaatagaagtatgagtagaagtcaaaaccataattgaccctaataccacctgtagtaaaactagggaggataagatccccttttcattcctgagttggtttttttccctctttaggctagatgaacagtgtagtgctattcccacccgtaccatgcatttygagaagcactggagattactggaaagtatgaaagcacagtatgttgctgggaatggttttcgaaaagtgtcctgtgtggtaagtgtttagagatcgttcagcaactaagaaattacaagaagtaacgttgcttctttggaaccttcatcaaatacatgatatataaggtccttttgtgcaaatatttttactgtgatttatagcttgtattgattrtgatcrtgtggtggccttagctatttagttcttgttctgataaagcttactaagtagttaataataatactagattttaatctcacgaaattgccactgttgttatgtggagatctttttatacaaaatgaaggctgaatttattgattttgttgtaaattgatgggaatataactttcctataaaaccattctttgattcagacttctgatttctaattctttatatatgataagccattaatttaaaaatgcttttatggccttttcttttttagttaagctcaaatcttcgtcatgtgagagtatttgaaatggacatagatgatgaatgggagctcgatgagtcttcagatgaagaggaggaggccagtaataagcctgtaaaaataaaggaagaagtgttgtckgagtcagaggcagagaaccaacaagctggtgctgccgctttagctccagagatagtcattaaagtggaaaaacttgaccctgagctagactcctaatctagcttgccattattgtgtgtgtaattatggccaaaaggacataggagatggactaagatgtcttggaccacctttgtgtaacaaagaaataaacagtaaattttattttttcatattctgcttcatcttctcttagtgatatagtcactatgatagactttattttttctgagctttctctttaatgctatgtgcagaactagtgtttaaagaaaacagggccaggcatggtggctcatgctggtaatctcagcactttgggagtctgaggtgggtggctcacctgaagtcaggagttcaagaccagcctggccaacatggcaaaaccccgtctctactaaaaatacaaaaatgagctgggcgtggtgcatgcccctataattccagccacttgggaggctgaggcatgagaatcgcttaaacctgggagccagaggtttcagtgggctgagattgcgccattgcactccatccagcctgcgtgatggagtgagactctgtctcaaaaaagaaagagagaaggtgaacaaattgaatatgaagaaaaagtctaatcttttctgtcagaagggtaggtatcaggaattgttcctgtatcattgaaatagtcgctcatcactggaaattttaatgcatttagtattttaaaactatagacaacattcctatttttccatctccccttctagttcattttgggtctccagaatgattttaaaattatgttttcagaatatattatactgatttactgaaatgctaagccaaaggatggatcctgtcttttatggtttaaataacataaacactgcttgatacctacatggttatcttttctcattctgtccctgcatttgagctctgagttatttgaatcagcagtgcttagatgtgcccttttgccttttcagacttggttaaggacatatagtagctgtctgtttggttgactccttgagagtgtgagaaatatgggtcaactaaatgttatctggcattagtgcagataagctactgttgatttcctaatgctcattcattcctaaagtacaatagtattcttgtgtgactttcaaagaaattaatttaatatatgaattccactatcacttcatcgataatcactttttaaagcttaaatatctttaggcaggaggatatactataaccaggtgaatgggtaactgcagggttgctgtgtcatttgtctatttaataggtagctgtctctctaggtactccagggtacctctgtgaatggaagccactgttgggtgacatagcatttaggactgtgatcaggaggctgactatactgatctgtagccttgcatatgataggccttaaactctattaacaaatttacgtaaatgtttactgacagttgggcattgttcctggggtagtgcagaatgtcttgaattagcttttgtgagcaagaaaggtgaactgtgagatgacattactgaaaaattataggttgtgggtatatagagcatttttagaaagaatgcattgtgcagatttaccatataacatttaaagagctttaatggattttaggaaccaataattaatagcctgttcttagaaagaacgacagtttcaccagttctttattagttagtaatttgtcctttgtgacctcactgttagatttataaagattttttgatacatacacatttgctttctatggttccagcgtagacataaaatatgggagaattggtttttcagtaatggttttaatatgtatagcaagtaggaactagaattgtattaaagtgaaaaagtttaaattgacatctgaatctctttttaagttttaataagatgcatagagcagagaattttattgtatttttagatatatgctataattcttgacaccactagacattttgcttttttaaaagaaaaatttaatttttaatttttgtgggtacatagtaggtatatgtatttatggggcacatgagattttggtagagcatacaatatagacactttgcttttaatatgtagagcaatttgatcattatacactggctacttttagtatgtttagctgcagatgctgaatttgagctttgaatttagtgaggagcaagtgaagggtgggaatgtgaggaccctgggaagaggagcctccaggtcctggctcttgtggaccgtggcataaagtggggtaattgagtgtctctctcagggtttgaggactaatgagggttacttatagaacactgtggttagcgcatgtgagatacccaataaagactagcacttctatttacaatattctattctgctttttgctgacataaattgtgttgatttttttagaaacttaactagcctttttttttttttttttttggccagacttgatagaactataatagtagtctttctaattctctggcttagtagggttttttgttgttgttgtgttcttgatttttttccaatgtaaaaattgtacacttagcaaaatgctaaaatattctgtcttcttaatttggaacatttgaatgtaaatgtgaagaaaactattatgatatagccttgagtttatgatgccataactaggggaatttatatatatttgagttgatctaaatattttcccattcttgagggaagtccagcaagcagacatgcgctaaacacttctttctaaaggatgctataattgaaatcatgggttgcatttcaccaggagcaaatcagtttctttgacacctctttaagttgcaatgttgtggtgattatctacagactgtttacatttgctagaagctacagttgactatccagcataatatttttagtcttcactgagcccaaggagatagtacttaggattttatgaatttaaggtcactaaaaccttataatatgagagcaaataacatattagcatagaaatgatctcttatgaggaatattcagttcagaaactcgattattaaatgggtctgggaaatgatttgttaatatggttgatagccagtgtttactttccactttttttcttgttctgaggaaatgaaaatttctataacaggatttctcatgaagcacacagtagtacatcagaagtgccaaggccagtgattaaaaatgtatggattttaccctaagcctactcaatcagaagctgagggtgaggccaagactacatttttaaccaactcacttgatcattcttaaacccaccaaggttgagaaccattatttttctatgaaagctgtgttttagaaattagatggttataatttcttagttgtaggttcataagctgttcccttggatgcaatgaaaattgatgtattttttttctttaaaaatgaccctaactggtggttaattacacatgcaagttgctcacacttcaataaatctgtttaaatgatggtgagcataattgtaccccaactccctctctgcactgcagcattgtagcaatggatcccttagggccacatttcagccctaacaagattatgttcagccaagtgggagatagttgggtatgtatgggctttgctggtaatcagccattctagttcataaatgtcacctttcctctggtgtgtgcagtcagactgaactcactgctcaagatatgaggtgtaatgtgtagttatcacggtacagatgataaatctgtcccacaacatgactataagtgaaacttatgtttactggcttattatgttttaagcagtaaaacaagacaagtttgttgtttgtgcttcctgccatcagatttatgactgaaaactttagggactgtttttcttcatttctgcattcctgattcctgttacagagtgaatattattctttcaagtgatatttctgtccactgttcagatagtaaaactgggtggagcccaaactggaggagtggccagcttgctataaatgatcctcgtgattgtcagcattttcatgatactgcaaaactttctaaccttgagaatatgttacttccctttttcctttccaccgcttactttgtcctgccaaattgttgcaggaagagagattcaaggattaaaaatatttatgggcctggcaggtagctcacgcctataatcccaacactttgggaagccgaggtgagtggattgcttgagctcaggagtttcggcaacatggcaaaccccgtgtctataaaatacaaaaattagctgggcgtggtggtgcatgcctatagtcccagctactcaggaggcagaggtgcaagggattgagcctgggaggtggaggctgtggtgagctctgattgtgtcactgcactccagcctgggtgacagagaccttgtctcaaataaattatatgtatgatatatgtgtgtgtgtgtgtgtgtgtgtgtgtgtgtgtgtgtgtgtgtgtatgtatatatgtatacatatatatatatatatcctcgttctcttgggatggaaagttaagatctagcggcagagtgtggatagcaaaggggctggctgagaccattgttctggggccctgcaaggtgtagggcccattttctccactggagaaggaggagactacatggcccaggtggcaggacacccaagtgaccagttcaatggacacctttcaggctggtgtagtcaggcatatcagatgctgcggagaaacagcgagatggaaaattgcccattacctctgaaaagctgcatgtcagttgtgaccctgatagaaacttggaggcgtgttgaggacaggagccctattgaaatgggtgtagaatggatgtgaggtgagtcagtggaggccaagtggaggcaactctggaggattttgctgtgaggggcacagagatggagtggtggcaggggagggaaatggcaccagagaactttttttagaaagatggatgatactaggcatctttattcgtcaatatgagtgatccaccaaagaaggagaaattgaccattctagagtaaaaggagatgcgctggaagaaatccttgagaaggctaaaagggctagggcccagtgaccattgcagggatcgagcgtagggtggaacatgactttcttccaccctaatgggagtctgtggggacaggtgctggtgggtgcagcaccgcgtggcaggtgtagcatttttccctcggagagaagtgttcaggtctttatggagagtgatgaggagaggagaggtagaaaataggtgtctcagattggaaaatgagagaattatggagttttagaatcagagggatagaaataaagaggctatgaccagagaagagacattggcagtcttagggaggtggtgaagtctctgatgacaggtataaccatggcagttggcagctgctattggtgtgaaggggaaagtcactggagccaagtagattcagagctgagtggctggggttttggatggctcatctgtgtggctggtaaagttgcaaaagcagatggagatggtaacagtgagttgggtcctgaggtcacccgtgaatgaggaggtatcagtggggtattgagagcagaaggaaaaactgcttctgagactcttgctaccttgaaagacccagaggagggtcaggcacctacctagtcagttagtagcaaggctgggatctaagcccagggggactggactgccctggaggagctcctaacagacacctgtggttagaaaggacatgagaacaggataaaaagactaagccaacctgtaagcatggccactgcctttgaatctctgtctactgtaggttagtgctcctcacacctgggaggtaagattaagggctctaatggtggtggactttttaatttaatttaatttaattttattttattttagacacgatcttgctctgttacccaggcttcaggctaaagtgtagtggcataaacayggctcactgcagacttgatctcctgggctcaagcaatcctcccgagtagctcagattaacagcacatgccaccacgcctggctaatttttttttttttttgtaatgacggggtcttgccatgttacccagattggttttgaaaccctgggctcaagcagtcctcccacctcagcctcccaaagtgcttggactacaggtgtgagccaccata

SEQ ID NO: 94294 - DNA, 9265 bp, Homo sapiens
ggtcgaagtaaaataatactagattctgggaaagttctgcaatgtacaagggatcactgtatatccgtcccttcaactatacaatgggtgcagtggcaggattagtatgatgcaattactatagaattccgagtctacctgaaggtttacagcttccaaaaaaagattttatcaattttgtagcacagatcaacagcagctacttattccttaataaccaccaatgtgggatgctgctttgcaaatatttctggagcagcttacaagagccatggcaaacaaaaaggaccctgtcctccaaatctcagggggactcatttgccgattgctgcttctgcttatggaggtcccgacagaggtgaatcgtcattgttatattccccaaatattatgcaggctctttgtccctctgtgcaaccaactttcagtagatttaaaaagcgaaaatattttttcttgattgttcttctttttctcttaagatgtttgtagactaaaacattcaaaattaatcatatacacacacacacacacacacacacacacacacacatatatatatataatgaattgtggttttaacgatatgtgccccaaaacaatgggcctcaaaagagacccaagacaaagctcaatacagctgatttacaggagagtaagagcctatataatgagtaaacaaaactctaccaaaccatagaagtagaaaatcttatgttcaaagttacagcactttaaaatttaaatgctctttttcagcaccagcaaaatcacaaactacagagtgaaatagagaagtatggctcattttaataacaactacaaaataattacgaaaaaataagcttttttttgacagcccaaatggcagccttactaaaatataatatttacaattaagctacataataagctaatagaatgaacaaaagaagcacaaacaattacagacaaaaattattaatcaaaagagtaaaattattttaaaacctaaaaaagtctagagataaaccacacagtgaaacagagaagtatggctcattttaagacgtaaaaaaaaattatggtctgaaactttttttagacagcccaaatggtggtcttacagaaacataatatttaaaattaagtttcagagtaagctaatagaagaaaaaaaagaaccacaaaaaattatgaacaaaaattaataaaaaagtaaaactattttgaaacctaaaaaagtctagggataaaaagaaaaaaatattcactacagatatttaaaagcagacttgagctgggggaagaacaaactatcagcaaaccaaagaaagggtgttgacataattaagttaggaaatgaaagaaaaagtataaagcaatgggaataaagcctaaaatgtcgtggaacactatcaagcagacatattacgcatactggaagttcaaaggatgagaaaaagaatcaggaagactatttagaaacaataatgttaaagaatgtcaaaggcaacaaactccaagtaagagaaactcaaataaacaaacttaaattatatgataattaaactcatcaaaagaaagacagagaaaatcctgaaagcaacaaaagaagtggctagttatgttactggctagtaaccctcaaaaataatcagcagataccttatctgaaaactcagaggacagaaagcaatagattaacatattccaaatgatgtgagaaaaaacttttgaacagaaatcttatgttcaaaacattgtcccttataagtgagggagaaattatgacatttccagataaaagctgggacattttaccagtagactatctttttaaaaaatgccttatgggatacttcatggtaaaatgaacagataataaggagcagtatgaatggatatatattaaggtaaagataaatatataagctattataaaacataaagaataacagtgtacacctccacaatgtgtttcccatgcaatttaaaacacaaatatatttaataaaaatactatcactaagttgcgtttttgacatacagtgcataaaggtatgattttgagaactcaataaggaaatcatgggggtgcagttatacagggttaagggatttgtgtgttattgaaagtcagctagtataactttaaaagtggaatacctttagaatattcaatgtaatcacagtatcaatgacaattaaaaaagaaaaagagtaacagacaggtagaaagctttctgtactacaccagagagtaagagatgtggatttagctactctcacttgaggctactaagccagctatcatgcaccatgagacaaagcccaagctgtcccaccagggcataattgtggagagcctaaagcccatagcatagctgctatttcaaacaattttcactacgtcagtggtgatgaaatagaataggctcatccatacgcagaacctggtaaagaactggaggcagaaagaagtggctatgtggagatgcaaatgaaacaaatttggcacagcaactacttcaatcctgtgtctttcttcctggctttccaggagtttgaggttgaaactattgttgacaaaagacgagacaaaaatggaaagacagaggccaggcacagtggctcatgcctgtaatcccagcactttgcaaggctgaggcgggcagattacgagttcaggagatggagaccattctggctaatacagtgaaaacctctttctactaaaaatcataaagttagccaggcgtggtggcaggcccctctaatctcagctacccgggaggctgaggcaggagaatcgcatgaacccaggaggtggaggttgcagtgagccgagattgtgcaattgtgccactgtactcctgcctgggtgatagctcaagactttgtctaaaaaaaaaaacaaaacaaaacaacaacaacaacaacaaaaatttttggtgttgcaaaggttaagaagaaacggtatgacacttgggaaccagagcagcaccggtcaaaaatatatatattactttaacagatgacagactgaaaaacagaaaaagtaaaaaagtggcatggaccagaacaactagaactttttcaaacaataccagaagatgaacttctacatctaccaagcccaacttttctaagaatactcctaaaacgctagtgtctggccaacaccacaaattcaaaagcagccagttatgttctgccagccagaatgttagcagtaatccagggtcacctctgtccgacccaaagaatatggagctactgtgttcaactatcaagaaagacacttgccccttacaacccttttaacaacaagaacacagtgagtggcattcaggaactctagaatctggaccctattgcagcagatcagcaggatacagtggtcttcaaggaggaggaagggaagatcatcagggctttatcagatcccagggcaggacattgtggaatagagagcaagacccagattcacccactattttctcagaggtctggctcagttacggcttccatggctgcagactcagctaccaaaaaaggtatagtggtattaatgggccaatcggcagccaatggaaaaacagatgtgcatacattagttgcaagagtgaaagttgggcaaagaaatgttactgacggtggcagagaccagctttttatccagaagatgtacctcatcataggcctagcagaaagtgccagcacatacagagatattgcagtgaagaaagaggacagattcacccagatgtgcctataaactagatcaacataaaaaatgtactgaatatagaagtaattaaagcaatggttaatgctctgaatagggctgctgtgggtggcagcaagcttgtgctgttcagtgcagctggaagtgtcttttgctgtggtctcgatttggggtactttctgaagtatttaaggaaggacagaaacagaacaagccttgagatggtgaacaccatcaagaactttgtgaatactttcaatcaattttaaaagcctgtttttgtatcagtcagtggcccatccttcggaataggtgcatccacactgcctctttgtgatttcttctgagctaatgaaaagccttggtttcaaaccccttatatgacatctggacagagtccagatggctgttgtgttactttagttcctacttgaactttgcatcatccagcctccttaattattgtggccatgagacattacttcatcccttgattgatcccaggccaaggtctcaggccaagctgtcacttcagctccttcttggtccagggccaagttccaaggctgagccttgtagcttctacaaatcatcacttcagctccagatgaatccaaggccaagtttcagggccaagccaaatgacacctactccaagaacactaaccacatttctttacttctctgtccttagaaactgtaaagcacagcctcatagtaggtaaaccactcacattccacccccactgtgaagagttttttactttcacttataaaagttttgattcaacctttttgcatccatcctccttaattttcttggccatgagacaaagaactctgtgtgatatctcacaattagagatttctagatcgtagtgcactaatgagactgcaatgattgaagtctgggaattgagctctgggatgcatcagccttgcgagaccaactgacacactgtccccacactgtgatacacacccttcgggtcagtcaaccatatagtggtcaccaatggagtctgaaaaggggcaaggcagatttatacagcctagaaacctgagggacaccatcaagcagccatacatatgcattttggaagttccaaggaagagacaaaaactcatggatactatttaacaacatagtcataaagaatgcaacaatttaagacaataagtaagcacccaaggagctcaacagactccaagtaacaaaaactcaaagaaacaaactcaaacttacctgataattaaactgtctaaaataaatacaaagagaatcttgaggattttcaagggaagcaggggaagtagctagtcatgtaaaagggaccctaaaaataaccagtggatcgcttatctgaataaccaccgaaaagcagtagatttcttatctgaaaactgagatagaaagcagtagcctcatatattccaagtgatgtcagaaaaaactgtcaagcctaaacattatgatccaccaaactgtccatcaaaggtgagggacaaattatgacattcccatatacaaactggcaccttttacaagtagactaccctttaagaaatgtcttatggagtacttcagggtagaatggacagacactcaaaagcagtatgaacaagcaaagattaaggtaaagataaatacatgaacaaatatgtaagataaaaaatttggccgggcgcagtggctcacgcctgtaatcccagcattttgggaggctgaggtgcgtggatcacgaggtcaggagatcgagacaatcctggctaacacggtgaaaccccgtctctactaaaaatacaacaaaaaattcgccgggccaggtggcaggtgcctgtagtctcagctactcgggaggctgagacaggagaatggcgtgaatccgggaggcggagcttgtagtgagccaagatctcactactgcactccagcctcattgacagggcgagactccatctcaaaacaaaacaaaacaaaacaaaacaaaacgaacaattaacaatgtgcacctccacaatttgttctccacataacttaaaacacaaatatatttaataaaaaaactaccactaatttgtgtttttgacataaaatcaataaaggtataattttgagaactcagtaagtgaaataatggaggtacattatacaggagtaaaggctttgtatgttactgaaggtaagctagtgtaactttaaaaatgttataacattagaatgttccatataatcgtcatagcaaccacaattaaacaaagaaacacaaaagagtaacaggcaggaagaaagctttctgtactacaccagagggttggggctgtggatttagctactctcacctgaggctactgagcaagttgtcatgcaccatgagacaaagcccaagctgtcccaccaggcagtaagtatggagaggttcaggcacatggcatagctgctatttcgcacaattttcactacaccagtggtgacaaaatagaagaggttcatccatacacagaacctggtgaagagctggaggcagaaagaagtgtctatgtggagacgcaactgaaacaaaggtggcacagcaactgttccaatcccgtgtctttcctcatggcttcccaggagtttgaggttgaagctattgttgacaaaagacaggataaaaatgggaatacacagtatttggttcggtggaaaggttatgacaaacaggatgacacttgggaaccagagcagcacctcatgaactgtgaaaaatgtgtacatgattttaatagacgacagactgaaaaacagaaaaaactgacatggactacaaccagtagaattttttcaaacaatgccagaagaagaacttccagatctacaaaagcaaactattctaagaactctcctaaaacgccagtgactgataaacaccacaggtccaaaaaccgcaagttatttgctgccagcaagaacgttaggagaaaggcagcttcaattctctccgacacaaagaatatggagataataaattcaactattgagacccttgcacctgacagcccctttgaccacaaaactgtgagtggctttcagaaacttgagaaactggaccctattgcagcagatcagcaggacacggtggtcttcaaggtgacagaagggaaactcctccgggaccctttgtcacgtcctggtgcagaacagactggaatacagaacaagactcagatrcacccactaatgtcgcagatgtctggctcagttactgcttctatggccacaggttcagctacccgaaagggtatagtggtattaatagacccattagcagccaatgggacaacagacatgcatacctcagttccaagagtgaaaggtgggcaaagaaatattactgatgacagcagagrccagccttttatcaagaagatgcacttcaccataaggctaacagaaagtgccakcacatacagagacattgtagtgaagaaagaggatggattcacccagatagtgctatcaactagatcgacagaaaaaaatgcactgaatacagaagtaattaaagaaatrgttaatgctctgaatagcgctgctgcagatgacagcaagctcgtgctgttcagtgcagctggaagtgtcttttgctgcggtcttgattttgggtactttgtgargcacttaaggaatracagaaacacagcaagccttgaaatggtggacaccatcaagaactttgtgaatacttttattcaatttaaaaagcctattgttgtatcagtcaatggccctgcsattggactaggtgcatccatcctgcctctttgtgatctcgtgtgggctaatgaaaaggcttggttccaaaccccttatacgacctttggacagagtccagatggctgttcttctattacattccccaaaatgatgggtaaagcatctgccaatgaaatgttaattgctgggcgaaagctgacagcamgggaggcatgcgccaaaggcctggtctctcaggtatttttgactggaactttcacccaagaggttatgattcaaattaaggagcttgcctcatacaatscaattgtactggaagaatgtaaggccctcgttcgctgtaatattaagttggagttggaacaggccaatgagagagagtgtgaggtgctgaggaagatctggagctcagcccaagggatagaatccatgttaaagtatgttgaaaataaaattgatgagttttaattgtcagtctgtctgctcaggacacaagaactaaggggcaacaaatgcatcatgagttgcaagatgccctaatccatcttcatagcccaaaacaatttcacccatagctaaggcttggaaacagaactggaaatgtccaagctatgtatttaaattatcacatcatttttaagcactgtagctttacaaggagtaacaaaacagcctctttgcccaaatgtgattattttatgcacacctaagcccaaatataaaaacagactcttcttgcaagctctaatatgtatctatggctactactatatataagaccagagttgtgttttattagatgtttrtgacagagaatcctgtaataatgttgattttttcttatttttatatcctagaatacctctrttgggatataaagcagccttccctcccagaaagacacagaatgatcagagatggtgcccttgactttatagtggcacaaacrcttcagagacacacaattataagagacttatcttttagcataaatacttatggcwcaaaatccactgacgatcattctcctaaactgaacacatgactagaattggtggtgagatatcgcttgattttcttttcctttataaatgtctagttcttacccagttaacaaaagaaaactttatcgctctaaagtaaaacttgttacaccacattagtgaattatggaatgattttggtggaaatatccaggttctaatgtgtggaatgtgcagatttaggttactttagtgtatgttctagttaataagttaaaattctggacacattattaaaggcagaaacttctttcaaarcaaacaccgctacactttgtatgacctttacaattatcagtgtctctttttatgagcacacaattttctagaacactgtatgtgctcagttatgcaaaagctctatgaatcctgtcttgttggtttttatcgaggctccattacatagacataattgaataatccactggccactggtgatgaatgtcatctttgtcacaagatctctagggtgtcacttcaccagccaagaacctctgtggatgatggcacctttgtgcaaggttcccttgagcctgcttttctaattttacaaacccatcttacaggctgcactcagctcaaactatgggcttaggtttcattttgctatggatgcaccaggcacagactggaggcagatgcatgagtgagtgttggttcagtccagccactgcacacagctttgcctgttatctgtgatgaggtaagcaggtcaggtgctggtacaggtgacag

SEQ ID NO: 94295 - DNA, 52315 bp, Homo sapiens
taccaatcagcgggatgtgggtggggccagataagagaataaaagcaggctgcccaagccagcagtggcaacccactcgggtccccttccacactgtggaagctttgttctttcgctctttgcaataaatcttgctactgctcactctttgggtccacactgcttttatgagctgtaaaactcaccgcaaaggtctgaagcttcactcctgaagccagcgagaccacgaacccaccagaaggaagaaactccgaacacatctgaacatcagaaggaacaaactccagatgcgccaccttaaaagctgtaacactcaccgtgagggtctgcggcttcatttttgaagtcagtgagacccagaacccaccaattccggacacattattactgattctaccttgctactcattattggtttgttcaggttttctatttattccttattcaatcttggtaggttctatgtttctaggaatttctccttttcctctagattttccagtttgttagtgtataattgtttataacagtctctgatgatcttttgtatttctgtgatatcagttatgtctccttttccatttctaattttgcttatttggatcttctctcttcctggttagtctagctagggatttattaatgttgtttatcttttcaaagaaccaatgtgtttggttgaacctttgtattattttattagtttctatctcattgagttctgctctgatatttattatttctttccttgcactagttttgggtttggtttgttctttttgtttgtttgttttgtgttttttaatcaagttccttaaggtgcatcattagattatatatttgaaaattttctccttttttttttttttttttttgagacagagtttcactcagtcttctaggctggagtgcagtggtgtgatctcagctcactgcaacctctgcctcccaggttcaagagatcctcctgcctgagtcccctgagtagctggaactataggcgctcaaccacgcccagctaatttttgtgtttttagtagggacggggtttcaccatgttggccaggatagtcttgatctcctgaatttgtgatgtgaccgcctcggcctcccagagtgctgggattacaggcatgagccaccatgtgcagcctcctgttttttttttttatgtaggtgtttattgctatcaacttccctcttagcagagcttttgctgtaccccacacattttggtatgtagtttttctattttcatttgtttccaaaaaatttttttttattttcttctcaatttcttcattgacccagtgaccattcaggagcatgttgtttaatttgcatgtatttgtagagtttccaaagttcctcttgatgttgatttttagttttatttaattggagtctgataaaacacttgatataattttaatttttaaaagtttgtttagacttgttttgtgtcctaacatatagtctgtcctggagaatattccatgtgctcatgaagacaatgtgtattctcagttgttttataaaattcatttaatatcttacacaatcacagaacagagttaagagaaacctgagatcatcttgccctaaaccacattttgcacaaaaggaaactgttatcaagaaaactatgtgatatgtctttaaaaaacagtgtttcctatagaactcaagtctttaatctgctggttgtttcactacagcagcagttctgaaagtatggttcagggacccctagggattccaagaacctttgaggagactgtgaggtcaaaattattttcacagtaatggtaagactctatttgccttttcattctcatctagcattagtgtatagtgaagttttccagaggttgcatgacatgggctgtatcaaaagaataaatgcaagccggaagcggtggctcacgcctgtcatccagcactttgggaggctgaggcaggtggatcacctgaggtcaggagttccagaccagcctggccaacatggcgaaaccctgtctctactaaaaatactaaaagttatccaggtgtggtggcgggtgcctgtaatcccagctatctgggaggctgaggcaggagaattgcttgaacccgggaggcggaggttgcagtgagcccagatcgcaccactgcactccagtctgggtgacagagcagactgtgtttcaaaaaaaaaaaaaaaaagaatgcaaaaacatacgagattccagtggtttttctcttaagctagacattagagcaatttgtgaaaataagaaatcaattttctataaaaaatgctatttatgttaatatgtacaatgcccattattattatatttttaaatatgctaatattgattaacataacctgtgtgtgtgtgtgtgtgtgtgtgtgtgtgtgtgtgtgtgtgtgtgtatatgaggttttggtgctctcaagaatttgtagatattatcacaataagtagaatgatgccattaaaagaaggaaacaaggacaacaccagctaccaattttttaaaattaatggtgttataaaaatgtcttctgtgaatagacagtagagactcaaaagggtggagtgggatgagtgatgagaaattacttaacaggtacaatgtatactattccggtgatggctacactaaaagccaagacttcaccactatgcactatattcatgtaacaaaactgcacctggactccataaatcttacaaataaaaagaaatgtattctgtggcactctccttctaaaaatagcttgggctgttttggaataatttttaacttattatatgtgattgcaagctccttatgtgccttggaattyagaatttcatgcttccactttcacaactgacttcatttaactttatgaagcttgtgctaaatatataaatgcttaaggatatgtgaaaatcattgaaaatgctaaattaaaatgattttaaactagttttaaattgtatcaactttacaaaataatttttttcagggagttacgctgttttctactcattgcttacttaggtttatcgaaggggcagatgagaggagaaattccctttctgaaacaaatgaaaaggacacacaaaaatattcttcagtttccctgccaatgtgtgtttccgctcagccctgaattcactgattttctacctgtcctcactccaatattttttaatcatcggttttaaatcttaattctgtaaacagatctaccattttcttagaaaatgaggtatttctgggaagaactgaaaagaaatggggactggattcatgaaaggaacttttgggggcctttgtgaacaggagttctagaaccactagggaagctcaaatattactccttataatttttgtatgatgttatcttcaataaagggtgtcaatgtagtcttcctgttaggtatgtcataattagatgcatataaaggaggaacaaacccatgcagcttctagaacaacaacaaatcgggagaaaggtagggtggaagtatccttctgtcgtggttgttatgttcttatgctgacctgaaaccatatttttgtgattcatgaaggtcataagaaagattatttccttcactgaacttggctattattctcacaagtcagttattcccttggtctcattgggcatgttttcaccctatttccttatcagttagtgctgggaagacaagaactttgtattttatacactgtactgtaacatataatatatgtaaacatgaaacaaaaacagattcattgtgatttcattttctcccacagtgaaagaatagatttaatcctttacctaatttgcatcctttgctcttccaatcctgttcaataattcatcagaaggcagtaacttagtggtaaacaacatattgtttccccttgttggtacttagtaagctttagcttctgcaatctgttctcatgaaatgaatcccataattcctttaatcattttagttactcttctctggatccattcaattagattacaactttttggcaggagaagtacttgagttgaacggtctttccatatgttgtctcagaagagtggtaagagaaagacttgtatcatttacattcatggctcaatgactatattcattttgactaagatagctttctggatatagtacagattgaacaaatgcttgtgaatgaaagtgtttaatatggacttattgaccatttattatttttctaatctatttgttaagccctttactgacatttggtttttcctttggaaaaactgattctaaataatggtaatacttttaaaatatgtatcatgctaataccataaattaggttatacaccatatgtccaaccaagctttagaacactttttacaaaaatgggcaaatcaaggttcaggaaaggatattataaaaaaatcatggatacacattgagaagaagagattgtcaaaataaggtaaggaaaagaagatgaaatgaatcaaattgcatattcaataacaataaaactcccaggagaaaatttgggtaagtagtactataaaggaatgatttttttaaaacatgtcccaatatgtaactgaacatgtaaaccagcttggagttcttttctttgatataggaaagggaacatttctgaaacaaaaacgaaatttttcacaaaacatttttttccatagctcaatggcacctgttttgcatggagacaagcacatgcaagaaaaagttgtaaaagtggaagcaaatgtggtctcagaagaggattgagaaaaacttaggtaaggctctggtacaagacattgtgggaattaaacaccctactagagatctgggggaaagcaccaagagcaagtcaaatactaggataggagatagaatcccttttcttggggaggttcaagagtccaaaacagccatattcaggatgcagtttcaggctggcatcagcatcagaactaggtccaaattcaagatctggttgtagatcaggctacacagagcagaagctttagagtcagtcatggaacaagtaccaatggaatggaaataggaatagttaatcactgtctttaggaaatggggcttttgaaatgggccaagagagtcaggcaggattgagtggttgtaagtattggcttggtcttcctcaggcccagaagaccaggaagaagtgattagccatggagactatacacttccacatggaaaatgcttagagagaatttggtttggttcagaagaaactgcatatcctccttcatcaacaatacttgaagttgagttgatagcagcagaagtgtgatttcaaaccccctttactagtgaagagaaagcattccctatttcctctactgagttaggattgtttatgggaccatatggggcagcctgtagatgattctgtgttcattgtgcacagtggggatggtctgggatttgtcacagactgacatcggagaattggaaaagctaaagaaagatatttcagttttataatgaaggtccagaattaatttggaggccagagggacctagaaaagaaaataaaaatgagaattacaaatgagtggatctttgccattggtaaaaatctgggtcacttatagctgtatttttccatctgtgcttttgtctgtgggctttgatagcatagtcgtctaataagtgtttcatcatctgaatctgacaatagatatcattccagaatacaattgttatgtaacaaaaattctgtatgttggagaaaaaaatcaaccaacacaattttaagctttgtatgtcttttgtttgcagggagtcaggcgtaaacaagcatttgtcattcgattcttctagtgcatttccagcatactgtgccttgggcatgacacatcagaatctgatgtttatcttttattacctgccagacccctctggaaaagcctctatggaattcatcatctgcagtctttgttgtaggtacacatataaatacatgttgaatgcatttgttgaggatattgtggtttctaacgctgaacttaaaaagtgttgagatgaataatgaagaggaccttctgcaggaggtatgaagctaatcattaaaatgtttttaaccaaaatattgacagtaaatctttttaaaaaatgtcaattrtttgaatgccagtaagaataagggcagcataattatacttgttatatgtccactcaggagaagtttatgaagaattgcccttctgtactacacagtgartttataaagataataaaaactaaacaattcaaaatattcatctaggaaagctcatttggtttgaataatcatttaagttcaataggcactgagtttcagaagcataagtatgctataaaaaaatttatttctattttggttgttattgagagaataatctttgtttttctcaaagctttggcctctttctaataaatatgctttgagattaaatgactaaaggtggaaacctgttttcaaattatatttgaaatgcacagcatgaataatgatagccacttatagggtctagcatatattaaaataatcagttgtcaacatataacatttctcctcacttcttaatgtgtgtgtacccaaccttcactcttgtatttctgactgaccattctgaaagactgaagtgcagayttggaggcaagctgtggtaaaatttgggaggatgtgagttatctttagtaggttaagaaaatataatgcaagaagcatacctactatgtgaagagtgcagtggaagaccagtgcattatgtatgaaatagtggcatatagagaacaaacctggtccccacttttgcatgtagtggagaagatagctaacatctaagaatgggttcactgatctgtatagtgaatacaagcagttgttttgaaatagagtcaagaacaaatgcactttccctaagggaaactgggcaaggctatgtgaagaaggcactccctgaggaggagctgtggcttatcctgtactgtcatgtcactgttgtaggcatcaaatggtggacatgtttatgtgattataatgaatttagctaaaagtaaattcatagctgcaaaggaaggcttatagaaagaaagtaaaggtaattagcatatacatcattagctttttgggattttgatttctaactatgtaacttcttggactagttttacttactacttctgatcccatggcagaactctgctttcttccccagctcccacaattttagtccaggattccaggtgatacagctcccatgaaagtccttaaaagccatgccctcctcaagaccagtctagaccaaatgttgattgtttactcttaggagagcagaaaaatgaacaatatgatttttaaactgcacaattctcacagcaagagacattctctgtcttttgaggaaaagttccctcaaagttggaatagagcattgtatttactagatgtaataaaggtgaatcttggctggccacttgacccaactccactgaataagctcttttatactctcctgtataggttcgcattctcaggaagtgaaagaatatggaaggagggagagagatgacatgtgacattccttttccagctaacagatgtttggaaaaggacaagactgtgtttcatgctagatgctctggtaatgtgagcaagagcagcatgaagttaactacaaaacacagcagctgaacaaaagctcagtggattccgaagggcagattgtgtatatggagaaaatccctcagaatacttacttccccagtctgaagaaattctttgtcagaatattcagtaaaatgaacagttattaatcttaggtttggtactcccctaaagaatattttactgagattctctatttaaaacaatgctgtaaagtcatgcattcagctacattcttagcagtggcagacaaaaaatagattgaaaacacattcttacttcttaaagtagatcctatgggtgtatgaaattgtgaaattgagtgaaagagtggcatatcataacaattaaaatctgtttatcaagaaccttgtgtgtggtgctgagctgggtaatatgtcaagtgagtaagatctgttccccaccctgcagatatttataactcaatacagagaacactgacacaggtagacacagttctgacgtttccatatcacagaaggaatgaatgccatctggggtgaagtcagagactcatcctgctctgcagcctgtatctgttgggggcatgaagtgcagccccatgggaggctctacctgaccttctagaggcttgcttcaagaggctagagatttacctaccccagctttccctgctttatgctattgtctgtgtgactctagagacctcctgattcttgttttgtattttccatttgttttgtctctgagaattcagaagatttgtcttctgaagatttcaaggtttatagttcattttataattatttacctcaaacttacctacttccagtgtatcaactagctctccatttaagaattctcagtggagagacaagacaaaaattagatttgagtttcaagggcagtggattaagctcgcacttcctgaaatgagaatgcctgcattttaatcttggctctgctacttactagctgtgtgacatggggcaaagtattggacttctctgtacctcactgggacattaatagtgcctacaggaagggattttgtggagattaaatgagttaatacatgtaaagtgcttagaactgtgcttacaatatagtgagaactcattaaaaaggagtcattcattacatatactttattatgttatgttgacctctaatagctctcctgttttcatttttacagccttaaagagttttacatgttttcctttacatgatagaatttgtttgcttatgatagtaatgataacaattatatataatatacctttttacataaacatatatccatccacttctagcctattaaggctttcctaaggcacaatgactagaactatttttagcaatcagttacaggcatatcataatttttttaaagggtagagcaccttcccctctcacatttaaagtatttttatattcatatttgcagtatttttatatgctgcagcagcccattagctgatatcttcaygaacagttccataacattcttggatcttttttcatactatattacagagcccattatcataaatatatattatatatacatgaatatttaaattttttctacatgtctttttacctttgaaatatttttgttgcttttctgctcacccacaaagccttcacaaattatttttgtcctgtctacatggataaatatatttttagccatacgatcttaatttctctaaaaaatatggagaattcttctttgatttaattatgaacatactaaataaaacaaaactttttgcttcctttattattttagtgttctttattatttagcttcatattatcaaaatcacatggtgttagacctttgtaaaattatgtttttccttctctgaaaatgtttggttaggtatatttttcttgtgtagaacttctattgtagattttgcataacttgcccacagaggtgagatttgtttatgggttgatacacactgttgactattagccaatttgttagaaataaaaacgagactcatagcttttcatatgggagcagctatatcatttacattctgatacttctttcacacagagctctcagtaatgatcgttgctctatcattctcggtcacatatgaatgttccacctaatctgccaacttaggtctaggttattatcttgtaaaagtggtgaggattaaacagttagaaagtgaaaatttgattgtagaagtggaaattaaccaggttgaccctgacatttggctaatctccccacaaatgtgcttggagatgagaaactcaacactttgacaaataacccattccattttgggcttattatattaagtaaaattytgattcattgcaaattccaagcaatttatctggattttccttctgtgctttgttttacttcaaaagatagagatactattgaactctcacttgaaatgtggagttttttttttttttaagacctggatttccttagttttctgtattttgtcacatataaagtttgtaagtagcatgaagagatgaaataagagttgtaaaccacacatatttgaattctgctatgttctagctatgaagccagtcaagttgctgcatttatcagatcctcagttgcctcactgaaatatatatctatatatttatatagatatatagagagtgagagcatgcatacacacacacacacacacacacacacacacacacasagagagagagagagaacattttagctattcttcagaaaagcaagagaaataatgttttctcagtatcttaagtggggtaatcataaccgtggtgaaaaggcctgatattgagggtaactactgtgaaaaaaccctaaagaaaaggtaaaatttatagagtaaagctacagaggcattgtagagcaggctttcactagcacaagcccatctaagtaaagaagcacaggtctaagcccttctagagaaaactttgaagaagtccatgccatattttatctaggaaagctgttttgactgaatcatcctagtgggttaccatcaggtcttgctgacatccaaagaagtctcatttagaatcttttataaaggagaagtctgagtcaaatgtcctttctggccttatacttcaacatggtaggtcttggttataattaattaattagaaattatttactcaattactactttatgctaggcaatatgttaggcacaaggatacatctaaatgccaccttctaagaatcttcagtctttgacatgttcttcttgtcatcctttcctgacttgacttcttatcccatctgtcttggattccatatcccattattttagcatcttccttgcccaaatcctcaacttatttttgtcattgtccttctgagtttgtgacctcatgaaaccttaaaccatggtgtcttcacatttccagctgagctttgctagagaaaataattacctgtgcagattggtgtcactttaaactttaaaacctccaattctttctgggcccttgatatttttctttcttgagtcggctctttctcagtttccactataactatgtgaaacaatttccattctccttaagcctttagtcttccatattcctactctatctgaacacttcttaccctaaagggaaaattggaagcatcacaaccctccaccttttcttatccagaatggataagatagattaaggtttaaaatcagttttagattgaaattctgccatttattgggtgaaaatcttcctgaggctcagttatctcatctgaaaggcactcatgaaatgttaacaattctttgctttctgtctttctcctcctaatagtcctcttcctcctcattttttctcttccttccttgtctcagtcagtttgggctaatataacaaattgccrtaggttggctggcttaaattacaaacatttatttctcacagttctggaggctgtaagtccaagttaaagcctctggcagatctagcatgtagtgaggcctcactttctggctggtagatgtacatattcttgtatcctatatggtggagagcagagacagaggaagtaagcactcttctatatttttttccccataagggcactaattgtatcttgaaggctgtagcctcatgacctaatcacctctcgaaggctctacctcctaacatcatcgcattaggtgttagggtttactgtatggtttgtgggggacayaaacatgccgttcttaactctgctctttcttctaacgatctaccccttttccttcctctgatagaggaaaatgtattaaagttaattcctttatttcaatcccagattccatcttttctgtcctcccagggacctccctttattttttttctactctctcctacatctccttttttgtttcctttcattaagcatgtatttatatatgtgtatatgtatgtatgcatgtatgtatgtatgtatgtatgtatttatttatttatttatttatttatttttgagacagggtctcactctgttgcccaggttggagtgcagtggtgcaatcttggctcactgcaacctccacctcccggattcaagtgattcttgtgcctcagtctcccgagtagctgggattacaggcgtgcaccaccatgtccagctaatttttatatttttagtagagatgggggtcttgttatgttggccaggctggtctcaaactcctggcctcaagtcatttgcccaccttggcctcccaaagtgctgagattacaggtgtaagccactgtgcctggctgtcttagcatttaaatatatgcaagtcttctctacytaaaagcaacgtaaacttttcttgaacctctatgtactcccctggtagacatattttctgtcttctttacttcatacttttgagttgtatttcatattttcatttgataatatttcttgtgtgcctgctgggtgtagatcctgggctaaacaactcacattccttttcaactcactggatctagctgctgctcacatgcttccaccgtgactgtccttaccawggcctccagtgacttgggttgcaaaatacaaagggcaagtattaataacaatcttatttatcatttcagcagcatggtccattggtacttcctttttatgtttactcattaactatggtgggtttttagttctatttatttatttatttatttttactgtgcaccatttaaatgaacatctcagttctcttttacatctcttattttctcagtccctgttctttcccttaataattccaaccactgtcaaggctattttttccttccattttgtcttttacattttgacccttatggtcaatgcttgctggacacctccagatgacacaatcaccttagattccatatgcccaaaacagaactcataatttcctttctcaagyctttgctttttgggtttcctagtcagaaatgtggttgtcatttttcattcctctgtctctgacacttcctatatccagctagttaccaagctgcgaaatccacttcccaagtatgtctgcactatgctcatttcgcccgcttctccagagctattctcctagttcagatcaatgtaatctctactccagattacccaagtgggtattagagatataaatagttccttgttttatggtatcctgacctagctgtagtgtttctcaattctacaagggacacttaaatgtatacttggcacttaagagatcataatgcctgggactaaagtaattaatgccttttagtttggagaaaaaaaacttatacatggacgaaagctctactttaatgatactgaaagttatttaatgaagcattaggtgagatctccaaagggatactatataatttaccaattataatgaagacaacataactatgagttatttgaagggacagaaagtttaataaggattctactttcattggagacttaagaacatcaatcatccattaaaaatagagctactatatatgattcagcaatccactactggatatatatccaaagggtgtggaatcagtatgttgaagagatatctacactcccatgtttattacagcattattcacaatagctaagatatagaattgacctaagcatctggcaatagatgaatggataaagaaaaagtgatatatatacacaatgggatagtattcagcctttgaaaggaaggaagccttaaacaggcaataattagcttagcccaggcattatgatcccttaagtgccaaataaaattttctgtcatttgttaaaacatgaatggacctagaggacattatgttaagtgaaataagccagacacagaaagacacatacttcatgatctcacttatatgtgatgtgtaaaaaggttgaactcagagaagcagagagtagaatgtggttaacagagggtgggtggtgaagggattggggagatgttggtcaaagaataaaaaattttatttagaaagaagagtagtttcaagagatctgctgtaccacatggtgactacagttaataataatatataagaggacctcaaaaagttcatggaaaatgtgtattataaaaactgtgcgtggattttaaaatattttgaaccaaagtaaattcatgctaatttgttatgacatgtctgaacaggatatagtttgaggcattaagcataggacatcagtttgaatacagcatgtatcagagcagcatgaattctgctaaaatcaaagcaagaatgaacatcaaatttatggtgaagctggggtggaagaatggtgaaatccttgatgctttataaaaagtttgtggggacaatgctccaaataaatcagcagtttgaaatgggtgactctttttgagaagagattaaacaatgttgaagatgaaggctgaagtggcagatcatccacatcaatttgccctarttgttcatgccttgattgaagacggctggcgattaacagcagaaacaatagccaacaccatagacatctcagttagttaagtttacacaattctgactgaaaacttaaagtacagcaaagtttctacttgatgtgtgccaaaaccattgtacccagatcaattggagataagagaagagctttcagtggaaattttaaaccggtatgatcaagattctgaagaatttcttcaaagaattgtaacaggagataaacatggctttaccagtatgatcctgaagatactgcacaattacagcaatggctagcaagaggtagaagtggtccagtcaaagcaaaagtggaccagtcaagagcaaacgtcatggcaattgtgttttttgagatgctcaaggcattttgcttgttgactctctagagggccaaagaatgagacctacttattaggaaagtgttttgagaaagttagccaacrctttagcagaaaaatgcccaggaaaccttcactagagagttctacttcaccacgatgatgctcctgctcatgccttgcatcgaacaagggtaattttgtgagcattttgatgggagatcataagcatccagtttacagcactgatttggctccttctgtcttccttttgtttcctaatcttacaaaaatctgtaaaggggattcatttttctttagttaataatgtaaaaaagaccgcattcatatgtttatcttccaggaccctcatttttaaagggatgcactaaatggctgctatgattgcttacaaaagtatattaaccttgatagagcttatgttgagaaataaagtttatattttatatttttatcttttaattccatttccatgaactttttgacataccttcatattgtatatataaaaattgctgagagaatagattttcagtgttttcaccacaaaaaatgggagataatatatatcctaatagcttaatttagccattccacaatgtatacatatatcaaaagattatattgtataccataaatatatataatttttacttgtcaattaaaattaataaacattttaaaaggaaaggagatctaggtcaccttttgtagcccttctgtccccaaataagaacattaatcattttgtaatggatggctacatcaaaccaccctgcaggttaatttttggttgtggccagaaaagtaggtaactgtcttatcaggacaggctagataatcaacaggagcctaggaaagaaggaaacagtgtgaccccaagaaatgataaaactagttttgtacagatggagatagggtttgtatgtgaaaattcccagctgtgaaggctggagagattgttgagagcctggattatgcagagccttagagaataccaatttgagttttccctgaaggtgaagggagaattgtggaggtattttcagcaaagaaataacaaaaccaaaattgtgttatagaaaaataacatggcagtagtatgaaggatgaatagaagaagggtaacattggatgcacagagaatggctagaaattgtggagttggtcaaagaatacaaaattacagttaaataggaataataaattcaagacatctaatacacagcattgtggctatagctaataatataccttcttgaawattctaagaaagcagatgttaagtgttctcatcaccaagtgataagtatgtgaaataatgcatatttaattagctagatgtaaccattccataatgtatacatactttaaaacattttgtggtatacatacatacaattttatctgtcagtttaaaaaattaaaggaaaacgccaaaaaaaccccactagacaatcttataaaaatgggcagttttaaaaagacacttcaaaaaagaagatattgaaaaaaattgtgtcaatccaggtgacaaaagatggaaaatggaagagctttatttttttctttttgagatagagtcttgctctgttgcccaggctggagtgcaatgacgagatctcggctcactgcaacctctgcctcccaaattcaagcaattctcctgcttcagcctctggagtagctgggattacaggcacccgctaccacacccggctaatttttgtatttttactagaggcggggtttcaccatgttggccaggctggtctcaaactcctgacctcaggtgatctacctgcctcggcctccaaagtgctgggattacagacgtgagccaccgcgcccggccagaagcgcttatttttaaatggtaaatcacttgaaaagaattgccacgtgtatttaactctttctactttctcgtatgctactttcacatttttactattataatgaaggtggcactgaacatacatgacgtatcttggattattttcttaaaccaagttgctaggagtaggaatacaaggttaataggtacggatatttttaaagtaattaatacaagtttgtgatgtagtctttgaaataacacttctgtaaatattttaagcacattttctttcttttttctttgaagaacacacttaaaggtaactgaaggcacattctttcctctttgacatattcttttaagtttgataattatcgatccctttttccactatttctaacagaggttaaaacttgatgaaattttgatttgcttgtttgcgttttcatgcacctctctcattaacaaaatcagatgtttggtaaatgcattaatgcctacacctcggactataactattatataggggtcaaaaaaagttttttttttttgtattgacattaaaaaggtaactgttagagaaaattaaaactaaatcaataaaatcattgatatttaraacctaaataactcattattatattggaaagaaatttattaggtcaaattagggtctacatttaatgcttggcagtattcctttaggttaagcgttttttagttaatttgatcaagtcactgagttgaaatgcaaaatgataaacttatattaaaccatataaacaccatttcaaaagaatcaccatggtgagaaaaacatgaattatgaaaatgtcttgtaatgaacttgaatgtaagaggaaacattttttatggccattcccatgtatgagacaaaaagccatctgacgaaacgatagtggaaacatttttgaattgtgaaaagctgctctggtgaaaatatcaaaagaatgaaaatcaacctgttgtagcagaaatttgggattgtccaaattaagcatgaattaaatgtrtatatttatgccatgcaatcaaaatgaaactgcatatctgtacttacgctcatgattcttccagcctggtttacctcactccctatcttcagctgaaatgcgccctcttctgtttaaggttagcctatctgaagactgaaatactctgcctgtgtagtaacagcattactgtagagtccaagccaggctatttggatcacactgccccactctaagaatcctcggactgcttgatatgccttcatgattctgagaggttcccctattttattgtgtttagaatctggagcttcttagataagggaatagtgcctgacccaatgaaagtcacctctaggctggccagggcctgtgaggtaatctagaatgagttatctttccaccagaaatcctcagtaatgcatagtgcccaggcaatatttgtggctgacctctgtttagtacttaccatgcatcaggcattgcttttccaacataatggtgccaccagggagagctgcaccactgagtacttgataaatggtcaaatatttctaaactgattggtaaacagtggctaacaagagcctcttaatggtccactctacccaaacttttctacctgtcctagtatttccctggggctcttggacctgtccacagcccatcaattaaagagttaaagaactagtacctggccctacaggccctccaggaccttgctacagcttcctagcaccccagcaatggttgggaggatatcctggtgacagtgttcattaagagtgtgccaagtacttggtgctctggagccaactggctgggttcaaatctgagctttgtcacttatgagacttgtgagcttgggttagttgattagtctttctttgactcaatttttctcatctctgaaataggatggtaatgtatttatcacatgggatatttttcagactaaataaattaagacaaagcatttagaagagatctagcacataataggcacaatataagtgttggttatttttattagatgtactaatggctaaatatttttaccatcaccctttagtaccacactagataccactgttggggaaaagacaggtggtcactgctgatacagttgtgcctcatatctctagagctgctgcatattctgaacagcattccggtagttttgagacctagttgtgtggtagttgagaaagtttatttctttacttcttaccttacattttaaatcaattggcagtatttaacaatcatgaaatttcaaataaaaatccagatttctggcatgttttgaaaatttgtaaaactggcaacacgagggccacgttttaatatggcaacaattgtctggactcctgtgttggctccttcctgggaagggstatcaactactgcgttcgccctccagcccattgtgtttttttgtaatctgtctgctatttgagtttgctctccttgaactaggctaacctgagcatatctctttctttacaacatggaggcccttaactgccacagcaacactttattgcctctactagattgtaatattctttgtgaatcatgttttatgttttgtttatttttatgtctttgattttgccttatccatagtaggttacaacttcactcttgggactaatgaaggttaaactggtrgtgatgtgaattaagatgggttttgcttttatacagaaaagagttataaaaatacaattgaaaaagaatatataattgaagaagttgaacaagttttatgagttacacagatcacactatataataaaaacagaattccatttaagtcaattatcaagctatggtgatgtaggaagcacctcaaataaaatacttagatttgaattcctattcttcctcagataygaccttgaacaaattacctaacccctgtgggttatttctgctttggaaaaaatgtaggtgataataaatattccctgtatgttgtgggtattagatgaaatataaaatattgtctggatatggcaatgcttttaaaatgttaatatttttataggtattattttaaagactttatttttttgttgttgagacagagtctcactctgttgcccaggctggagtgcagtggtgcgatcttggctcactgtaacctccacctcctgggtttaagcgattcttatgcctcagcctcccaagtagctgggactacagacaccaaattagccatcaaatctggctaattttttgtattttttgtagagatggagttttgccatgttgcccaggctggtcttgaactcctggcctcaagtgatccacccacctcagcctcccaaagttctgggattacaggcgtgagccaccccacctggctggatattatttaaaagactttaggcaaattaaatttaacagagtttgattgagcaaagaatgatttgagaattgggcctccctgagaaccaaaataggttcagagmgactctggagctgccacattgttggataacatttatggacagaacaagaaaagtgatgtacagaagacaataatgagtcacagaaacagctgaattagttacagctgggagtttcccttatttgaacatggtttgaacagttggctgcctgtgattggcaggcatctgaaattctaattggtacaggagtaggttatagtctgtttataaagttctaggccaaacttaagatatgtaaggaggtagctttatgtaaacaattcctccctttgggtcaacctcttaagattgagaggttgactgaaaccttaggcattgacgtcactctcacaccattgtaaatggacttatttggtctcaaattccactgggaaatagcagtacagtggattttgtaaggtgggaatatggaaacagaatgagagaaaaataacctgattgtttactttaggttaattttttgtaagggttagagcagaggggacctctttattatgctgggatctcctgttttcagaagaaaaaaaaactgtactgttttggaatctatcttcttccttaaagtttcactgtgattatgttgtattagcatgagtgattttgttttgatttggtctgttctgttggggtctaatgcaagagttcagtccagaacaatggtcttccataattttgtttaacaattctcttcttttggtcaggttctcacctagatgagagtgtgaccaaaacttagggctttggtgctacttcctattaccattattttgggttttctgtcttagcacattattgataggttatagtgtcttcacgatcaggcatttctttgagattttgtcattccagtcaaagataccatctgacattctacacatggctgtctgcaaacatttaaaactttggagagaatatagcataccagggagaatactattgtgactgtcagaatgataatgataatgactactatagtgactggcaggagcataccaagaatttggagtatgctccttagccaaggttcctattagttcctattaatcaactaaagttaaatagatcaaagaataagccagatgaaaagtctacatgttttaattaagcagcctgttcattaatctcttgtaactgaatctctacaaaacccagtgtatttattcatgtacaataagaagtgtaagccactgcacagatttctccctgttcagcctgtaggtaatctagagcaattttattatctagcacaastttagcaagagaatttaaagaagtctgctgcacagccacaggttttgcagtaaaatctgctgtacagactactgtaagggatacatttctaatcattacctcatttactccaagccatagaaaaagggaactaacaaatgatgcccatctagaaaggtgaaggcctcttggcaatgttttatttaacctaggatgtacgttaaaagaagtggactgatgttctgtttctgactgattatggagtaacaaaggtgtcattaaaattcctagcctacactggcccttcatcttgcatccatcaagagataaggttgctcatgtataaggttgtctgtgaaatctaacacaaataaaaatatacttcacacacataggccccttttcccactgtgttgttccaagaggcataagcaaggcaaaagttaagaaaggttaagaatctcacgatggaagagaagtcttgttccatgatcttgggaaagctttctatgtctaggatgccatctgcttcaagggagaaagttctctggttagctttaccttaaggtctctaacaagtgtttggtttcaagaggctggatgggccagactcaaggttcaaggtcccagtattttactgcagtgtgagtggcaagggaagtctttctctgatggtgtttccagaaggcccagtctctaagttttagaccatgaagggtttgactgtacccagtcagtggatcataaaaagctccttttacctaatgaaaatacactttggcacaatgcattgaagcctgcattgtagcatttagtcatataagaatttaggtgcagaagatacataaggttctattattagaggccttacagtgactatttcataaatggtcaactcatgttttgattggaagaggaactgattgttatcagtctgcagtacctttgaccaagacaattcagtccattcagttagacttgcctaatgctattatagctgtaacaccttatgttttacaacttgtccagtgaaacaagtacctttattgttggagatttctctaggaatgttccatgagagaaacacatttcttgataaccgttaagctattttagctattgttattgcattagccttcttgcatgagaaagcttgtatataactagaaaacatgcattacaaatgacaattgaatagaagccatctgtaaatgttcaaatggcccatcaagtagcaaaaatgtacctgaagttttttttgtcttcctaggattatggatttgacaaagcaaaataaaccactttggcaacttagaatagtcatgacaccagtatatttttaaaaatataatttggatgcaatctcggctcacttcaacctctgcctcctgggttcaagcgattctcctgcctcagcttcccgagtagctgggattacaggtgttcaccaccatgcctgaataatttttgcatttttagtagagatgggggtctcactatattggccaggctggactcgaactcctgacctcgagtgatccacctacctcggcatcccaaagtgctgagattacaggcgaaagccaccatgcctggctgagtgtagagctttcaatgatggcagttttaattacttgagaaggaccaggcagctctccagactctccatgagtccacactcgacaatgaattcatattatcttaaatacaaatttcgtttcttcaatttaggtgcatagcactgcttatcaaatgggttattgtaggcaatttgacttgaaccatgaacctcattcaaattgcatattttaacaacatcagtactggctgatctagcatggaaatctgctaaagtatttccttggtattcaattagttcttgtgctacttaagttggcaattttataaactggtcaacttcttcattagagcttttagtattcctatcccgtccaaatgtatatcattctagagttatcagaaacctgtgttcaagagtgtttatgagcattctttcaaacctttccatgaacctccttgaggacacaacattttaggattttacttgattgtaatgagctttaagaaagttcatcagaattaataaactgtgaataagacttaaaatggttatggttaaagatgcaattgacaaggaaatttggctctttctgtatcctataataatttaacataaataaacataattattgctgataacatatactaagacatatcagaatattaggagtcacatataattttgaaatacatattcataatatattcataaaatataactcagagaatgttaagtaccatttattttatgatgctttccattttatttaacatatcaaataagcctatttattgtctcttttttggatgcttcagggaccttttggaacatcctaaagttagtttgaaggaaaaaagagttaattttagaatttgaaatttgattttaggaagcctatcaaatatgccaaaggttttaaacactatcaaaatagaatcacagattacggcaaaataatagtaattaatttagcctaactgataattaaaaggttttcaaaagcaaaaatccttattcgttgatgaagaggagattcagttttccaaataatcaaaagacataataaagacagcacaaaacaaaatctgtctctcctctatttttctttgcattttactcaaaaggtggacgaacatctttcactcttattaatactacaataaattcttattcaaaggagaaaacagaattttacttttttcccctgtgaactctgcagagaattatgaattttacttttgtgttagtatataatcaatactactgctaattttaagaaaaccttataaacaaatacattcaccttcaatcagcttttgaacacacaagatttccataatcctttttatagcctcttgcatttttttctattttcccccaaccttgaatatccatttaattttatttatataattttttcattttgaaagaacctttaaataacctctaaactagacaaaattattttttctcaacaaatacacattttaattttctcatcaaaaacaatcttgcttttcttgtacactttacatatagaattatttattttattgtatttattttttttaagacagagtctcattctgtcacccaggctgaagtgcagtggcgcaatcttggctcactgcaacctccacctcccaggttcaagccattctcctgcctcagtctccctactaactgtggttacagatgtgtgccacaatgcctggctaatttttgcatttttagtagagatggggtttcactgtgttggccaggctggtctccaactcctgacctcaagtgatcctcccagcttggcctcccaaagtgctaggattacaggcatgagacatcgtggccagctaaattatttactttagtagttataattacatatattaacttaaattttaactcttagtaattctaacttccagtgtaaaacctaggaagttaatgattttgaagtgttttatatcagtatctgcagataaaaaccatttcataattgtttagaaagatgtttcctcaattatttttaatagatctaaatatatttacattttcaatatcatatacaaataagatgctaaggcataaatttatgttaataattaatacttcaatattttaacttcttagaaatgactcagatatttaatgagtatttatttctgaatttattcttattttttatttttattttttgagatagatcttgctttgtcacccagattggagtacagtggcatgatcttggctcactgcaatttttgcctcccatgctcaagtcattctcccacctcagcctcccgagtagctgggactacaggcacacaccaccgtgcctagctaatttttatatattttgtagagttgcatctcaccatgttgcctaggctggtctcaaattcctggggtcaagtgatgctcccacctcagtctcccaaagtgcttggattataggaatgagccattgctcctttccctatttctgaatttaacgcagctttaagattttaagtttctgaaaataattttgaaaaaataacgtaggtattytccctaatgtcctgagtggcacctaggatggctaggaaggccagggcccatctgggtccctaatttacacaccaggtgtagagtcaaggactgaggacagagctatgaaaaggatgtctggaggatccaacccctctcagcatggccagcaggcaaagctggaggaggaagggcagggccatagtgggcttggctgtgtcctgctgctagtggcccaggtacagtggacatacacgtctccaggcctcaccatgaccacctctccaggcctcagaattcaaaggctcaaaatcaaagatataagctcacagtaagatgtgtgaaaggcttcaggggaacccagtagccagccttttcagtgtcagcttacagacaatcaagcacgtatcaaaatttgacagaagcagcaattttatgaccctaaaacatatagcaaaaacagcataaacctttctgaccagtagacccagaaaaaaaagtctgaattatatttagtattgacaattctgaagacattcctattttattttgccaacaatgtaaaaacttgcttcatttgacaaatattatataagatcagaaagaaatatctgatacacataacacttacagacatatagacagacacggacaagggcagaagttaaaattttcagaaaaatttttcatttactagtttccaaatagtttttctttcccccaattcagactatcaatattccaattacctgtttcattgttctaagcaattgttagctagaaaaccctaaaatttcacttctaaaaggatgacttttaggtaaaacaaggtagaaattttatctctcaaatgcatacagctgagactttagacctaaatattgtaccatcttttgctcaaatcaaggagggaggatgtggataaatgcccagttaagacaggatggataggaaaaggtactttagaggagacttgttacataaatgtaagtcaatgataagagtctctagtaacttagtctttcctctcttcctgctgcacagaggcagacacccttaaaaatggaggtttcctttatagatgtaaatttcctttacagatatgtttcaaaatagccagctaaatgccagaaaggtgaatttggagaccaatttagttcaataggcagtctttttaagttagccactattttttagctaaaattactgagttcaggttggagcccattaattaataaggcgaggaaataattctctatgtgtggactcggtatggatagctctgaaaaagaaaaaagcctactttacttgagggcctacctttcatgaacactttatataattctctttttatctttggggcaggatagtaactaagccaaaagattagcagattcaatttttcttatcaattagttgcttaagctttttgtttgccttttgaaaggcttttaaaagaggcaatagaaatattaacatttttaagaatgttctgcacatcaataggtgtccctggatatgcctaatttgggagccttcatttttaaatgcagttcttaaagtgtggtgttggtgttgtttatttggagcattccactataattttaaattatctttataagattttgccatttttgtaagtacttgcagcttgtgggacctaataattatacatgtagaggtatgggatagacaaaagtggagcactcagttcatcagaaattaaggattccatttttatattgaaaattggttttggctctcacatcttgatcaactaagccgaagatttttccctacctcatgcattagaaaaagaaacaaaagggatagaacacaaaatcctggtgaatttctgaaagccagagttcacaccttctgcagtattgccatttactgccagtttgtctaaccagtcagccatctaagaattctaactggatataatccaattagttattgagtctaacccagtccagtgtctgtcatgacttctgtacccagttaagataaaaaatgtgcccatacaaattcagatagtcaaaacacaaacgcatggggatctccataatctgagagacaacttacccatgatccccagttgattcgagasagcaacagatacaatggagctggtgtaccttgcttaatcactcagtgctcctgggggttgctggaagctctacttcaaatcccacttctgaggccatctgttaaaagaaaacctgtagaaaaattaaattttaaactcagttaaagaacaattcaagagtcaggcagccctcagaacaagaatatgttcagagcgactcttaggctgtcgcatggtcagatgacatttatggacaggaaaagaaaagtgatgtacagaagatttccatcttggtacagaagatgggaatgagatacagaaacagtgtttgaacatgttttgaacaattggccacctgtgattggctgaaacactgtgattggtagaagagtagtttctagtctgcttagaaatttttaagtcaaacttaaaatatataaggaggtagccctaggctcaatttaatttgacaatatgattttatttatattagtgtttacagatgagaatgtcaaggccctagaaggacttgctactttgtggaaaggtcagaattacaacccaaacctcaatcatctgggctagtaagttttttactgaagcatcattcacattgcacctaagtgtaattaaaagatcaaggattaaggagaataaaaatactcgaatggaggtgggataaatgaaggatccaataaatttgttttattatagctatgtttatatgctgatcaccctagtatgtaaaagaaaaccaaaggactgaaaaggactgaatgaaatgtattcttcatttgaaacccctactcccttttttgagcatttttatggagtaaaaggtatgtactgtgccttagtttttgggctttttttttttttttttttgataccgaggctcactcttctctcactcttcttgcccaggctagaatgcaatggtgccatctcggctcactgcaacctcggctgcctcttgggttcaagcaattctcctgcctcagcctcccaaacagctgggattacaggcacgtgcaaccacgcctggctaatttttgtatttttagtagagatggggtttcaccatgttgaccaggctggtctcgatcttctgacctcgtgatccacccgccttggcctctcaaagtgctgggattacatgtgtgagccaccgcgcctggtcagtttttgggctcttattggtgaaattctcagttagtaactaggtaaattttttttttttcttaagaaactttctcttttgatcgggtttatatgagggcaggtgaatgtttttaaaatgacctttcttttgtcttggatctctggcttttaggaagcagaatggcatgttgaaaaacaaggtatttttagaaactgcatctttcattcactcttgtggcctggggcaagttattctgagtctcatttttcttatttgtaaaatggtgagattttattaacttaaggggtaccatgagaaaacatgcttgacaatgtgcttaattttaacacattgttatttaattgtttattcagttgcaggttagagtttaaaactgaaagagatgttaaagtttatgtcacccaattccttcaatttatatatgaaaatattatatatgagcaaagggtcaagctaagacaaatttagtctgctcatattgcattgataattatatacctggctaagtatttcattttctaaacaatacttctttaaaagactatataaataaataaataaataaaaataaatatatacatatgcatttaacaaaagtaaaattatagactatgcatttctagcaaaacaattttagacatggtgaacatgtacaataaagctttatatttctgccagattctatcagaagtgtgttgggaaaatttatgcaagtattgaaattaaatcctaaattacttacaaaattaattattatatattaagtatcatattatccaaatataaggttatttggagtgaaaaagaccacaattttctaataagtgaaactttaaagttacagaaaagcctttgttctaggaaatataactttgttaatataacaataataacaatgcatcataattacatataagcaagcaaaaaatgaaaatctttctttttctattttagccttgggagaatgaattggttttatagatgaagtgatacagctgctccccagcagttactcaacatatattcatataacttgcccacagatgtgaaacctctcggagcctgcttttcaaaaagatactaagctcaaagtgtttacagcatactttttgaccctgaccctgtcactttcctctctcctcaaaccactatgaggggtttgtaaaaaaccttaaaaataccagtgtcagctttttcaaaatttttcatattttttttcagtgacagcttttgtgtcttgggactgcaggggtgactctgtgcactgttagtgctgagattcctgagctccccagcaccagcctgtgcctcactgcctagctccctgctgggcatatcctgtcatgtcaaggattataactagattgtgaaagttaggttattttgttttgaatgcatttccttagattttcttaagctataaaatggtttggatatgatgtttgttttacacatataaaatacagtcacaaaatagcactttatgaattcaagtacttttttgaagtgaagtaaatattgatgcaattattaattgcattattaattttttcctttttcataaggaaaaagagagcagagaatacaattcttcagatgcttatgccttcagacaaaaaggttagaaatcctaaaaaatagaaatcataaaaagtaaactttttagttaaaataggttttgcaaaattattgaggaataaataatataaaattcccaaagtaaaaaataaacatagaaatcttgagtaattagacacgattttaatttacttaatgatattttctgtatcacatataaaaggagatagagactatctggcctatcagcacaacgctgggcttttaaattgtgagttattcaggtgagtgtggaagtgacaaaattttcatcattataaaagtcttctatgctcattaaaaaattgagctattcaaatatactctttcgacatccaaatatcattgtttgaataatctgttatttggctttttgtttattaattatcaacaggactcaacaagagatgaaggcaatgagactgaagccaacagcatgwacacattaagaaggacaaggaagaaagtcactaaaccatatgtttgttcaactgaagtggragaaacggatatgtccaattcaaatggtatctaactactctgagtcctcaaaaatggtgtggtcagaggcaatctccatttggtctttcttttcataaaacatcttcatttcttttttgggagaagcaaaaggacaaataaaagttattcctacataagtgtcataaaagatggcaaatataagcttacaacgtaaatatataaaaataaccaatcaaaatatttacaatgtaaagagggttagaattaggatgacagtagtagaaaaaaaaaagaacaaacagaggaatgtatgagtaggaagagagacagttttctgctctgaaaatgaatacaaaaatcattacagaggatttgaggggccataagaaaggtatggaaggtgttttcataacacattttggaactccaactagatttcaacagatgtgagacactgctaaaactagaagttaatttgggcaacaggctcaatcctaggaatcattgtgtcctaaggcaggacagtaggaattcccagcatatggttacaataaaaagcagtcagattttagtagattttattatttatttatttatttttaattaattaatttatttttttgagacagagtctcactctgtcacccaggctggagtgcagtggcatgatcttggctcactgcaatctctgcctcctgggctcaagtgatcctcctgcctcagcctcctgagtagctgggtttacagggcatgccaccatgccacgctaattttttatatttctagtagagatggggtttcaccatgttagccggtctggtctcaaactcctgacctcaaatgatccacctgcctcagccttccaaagtgctgggattacaggctacagacatgagccacctcacctggcctgtttttaaattctctataaacaatgcactttcttggccagtgactagggtagaccactcccattgcccctcatttaatatgtcactgctagaaatatactattttctcaagtattcctctccatattatattaagagacagttgaaaacagtggaaacatattttaacatttttccttattactacagagaggatcagaaaccaaatggtgtgccacaaattagggaacacaagcaaacctatcatgggacctggctctgctgagtctcatctgtcatatgatgacaaggactctcaggatgagacaacagtgataaaacctttgccccccagaacaacaaccaatgttcctggaggtgaatttaacccaaactctggtaaggatttactggtaaggattctggaacaaactggtatgtggttctagccactaaccctaagtctgtatttgaattagagagaatgtaatgttggttgaggaatactagccygggagtcagaacacttacaaagatttttatacctatcttttataaaatactttgtagttttctttaccctttaggctgttcatctggaaaatagaggggttgcaatggaagatgtcttgccttttctaaaagtaaaatcctattattctaagtttctggcttattaatagtgatgtaactattttggtacatgagtgtattggttaaaactcacttgaattaaaatgctggaaattagttacaaaagcaaatctaaaagccaggcacagtggcttacacctgtaatcccagcactttgggaggctgaggaggggagatcacttgaggcctggaattcgagaccagcctgggcaacataggcagaccctgtttctacacaataaaaaaattagctggtgtggtggcagatgcctgtggtcctagctactcaggggaatgaggtgggaggatcacttgagcccaggaggttgaggtgagttgtgattgtgctactgcattccagccagggtaacagagagagaccttacccccctaccccactctgaaaaaaggaaatctataatgacagggttaaacatacaagatttggaaagatgagaatataccagagtgggacgttagagggatagtgtctaccacattaccctcatttctgacaccaattacaagttttggaatcccccaagttaatcttagttttggtaatttgctggaaagacttactgaactcactgaaagctgttatattcaaggttatggtttattacactaaaaggatacagattaaaaatcagccatgggcagtccaggcaagttctaagcacagaatgttcacttgtcctttcttagtggagttatggacagacagcactattctcttggcaataacgtgaggaatattgccaaccaaggaagctcacttgagtcttggtgtccagagtctttactggggcttcatggttaactgggcatttggctgacttcactctccagccgctttggggatcaagcagttactgcatgacttgaagtcaccactataagtaacattgttagagtttctggcgtggcctagaaccccttggtaaacaaagacactcttgtcaggcaagacattctaaatgcttggagattatctcccagggaccaagggcaaagaccagagctctctttgggcaaggttaaatcctttagtacacacagggcctaaggaagagctagagcctggaaagtaaacacaaacttattatctttttaaaaatacaagtgtactatctcacagttttgtatgttagaagtctaggttggctcatctggtttccttgtttcaggttttccaaggctgaagtcaaggtattgccatctggtttcttatctagagactccaggcaacagtacatttacaagttcattcagattgttgagagaatccagttctttgtgactgtagaagtgaggttcttgtgtcctggctggttgtcagctggggtggcccttatctcccagaatcctttctgtggttttatatctcagagatagcaatgcctcaaatccttctcatatttagagcttttctgaattccccttcttccacatcccttttctgccttcagctggagaaagccatctaatttcaagggcttagatggataatccaagataatatccctattttaaggtccataaccttaattacatttgcaaagtcccttttgccatgcaatttaacatattcacatattccagagattaggtatggaagaaattttcgaggggttattctgcctactgataccgaaaagaggcagggaaatactgcatagaagagggcagtcccctggcaaaggccccaccctcaagcctggaaacccatggccctgaataggaacagacatttctgtttttgttccaaaatgttgccttttccaagaccactctggcccaccatgtccctatcctatgcccatataaaccccaagctccactgacagagcaggagaacagaatggcagagagggaaggagcatctgaaggtggggaggagttcagctggggacggtcggagaggagatccgtcgcgggacagccgaactccaggggaaagtcatattcccactccatcccatttcctgctccccaaccatcccactgagagccacctccatcactcagtaaaatccccacattcaccatccttctagtccatgtgacctgtttcttcctggactccggacaaggagccaggtacctagagaatagggtgtaaaaggccgttacccggaatttccactgagctggttaacagccgtccgtggatggcaaaactaaaagagcatggtaacacccctaaacactgctgtagggccgcaacccaaaagcgctcaccttggctcacctgcatgttccccctcccataagtggtttgagtgcagtggccgagtaaatgagtcatgtccctgttgcatgctccgcgaggaggtcagggaactctcccatctcactaccacaccgtctctcataagtgaatttctctctactttggctttatgaatttctccaaagtgaagagcatgagcactaacaacctctgaacatcaggcggctgttgatacaaatacccacaggggccagacggttaatacaaaagatgggctggtgtaagaacatagggagtggttctggtcatgagaaaactggagcagagagcaacagactatggcccaaaggctaaattcagcttgctggtcagtttttctaagtaatgtttacaaattgtttatagctgcttttgtgctaaaatgacattgtgctaaatgagtagctgcaacgaataccatatggcctacacggttgcaaatatttactatctggtcctttacagaaaatgcttgccaccccgtgaagtagaggttgcctgcccatctagactacctcagagttccaaccagttgttgctatggagaaatacctacccagggttgccagatctagtttcaaaataaatttgaactcaagatttttacataaaattttctaatagtgaagtgctgtccactatttcaaaaaagtttctaaacactgggaagactaatcagataacatctgctggccacattgactcctccacagtttgtggtcattgttttatatattctagttttagctacaaaagagagagggatttaccatttctttgtcttaagccagaaatctggagaaagwtcttgtatcatgagctctctttgcactgtcaattgtgacttacagcatgggtaccattactaactcaacttctttagctcagaagctccctttttggctcagggtgtattaagttctctataggccttcagtactaaaaatttaaactgcaaaccaatacatatacataatttaaaaataaactcccaaaataagtgtaaggaattttgatatggtatttcttctttggaataacttctctaagtttttccaaaactaatactttttttttttcaaagaaaagccccctttccctcccactttttattgtattgctttttttccctgctttgtacctggttattctgccacctgggctttccaacaatgtctgcgctaatatgatgtggccagaaggtagcacaaacagggtggctctcaccatagccacaatgatgaaagatggctggaccttgaaagagcatggtacattatgctaggtgtgcaataagctgaatgtattccagagttttctcgcaagtgcacttttccctttctttgaattggtatttctgaaagcccaaacatctcttcaatctcccttttatatgtgaccatggcttgctctctatatataactgatatatgtcctcattgtcactgaacacaaacaaaatttctccaaggcctcctagttgctatagagctttaaggttttttttttttaatattttcttattttttccctaaacattcacagcattaaaacatcttctataaaaacacattgatttaatttattaatcctctgagggaatagaaaagaagaaaatctcctaggaaccacactgtaggaaaaacaaatgagctcctgaactggcaattatctgcctgctattcatcatgtgcaactgggaaaggctgaccaaaaggtttaattgtaaataacaagtatgatttattgaagaaaataaattccgacaatgatgcagcaagatcagttgatgccttgaaaatgaaatgggattggatagcgttctcatatttggtgaaagaattgaacttttaaatgaaaaatcgatgcttaggatatgtactaaaatatatgatgacaacttttacttattaattagacaaagtcaaatcacacaggatgtattcattcattcactcactcacttatttaaaaaatatttgttgagtgactatgagatgcctatactgctacaagtaccaagaaaacagcagcaggtdaaactaagccttggcgctcaaggagctgataggcaatggagaatgacaggaacatgtgagtatacagtgtggcaggtgccaatttggacactgaagaaaacagaaacagaatgatacactgttatgtgttgaatggtgttcctccaaaattgttaaaatgaaatcctaaccttcagtacctgatagtgtggctgaatttggagatacgttctttaaagaggtaattaaggttaacttaggtcagtagggtggcccctaatccattatgattcatgtcctcatatgaagaagagtttaggccacagacatgcacagagaaaagaacatgtgaaggtgctggaagaagatggctgtctagaagccaaggggagagagagtttagaagaaacaatcctgctgacacctttggtttcggacctctagccttcagaactatgagaaaataaatttctgtgtaagccgcctgtctggggcatttgtcatagtagctttagcaaactaatacacgtaccctactcactgtccagtcacagggcaacttggagacttcaaaattaatcaagggttagagctgtccatgttgtgatcaagtttcatacaattaatacttcaggtgattatggttttttttttttccagccctttcactgtgtgaatttatcccacccttgtatttgatggcatgtttattatctatacttgccccacatcataatataaagttctatgagggtagggctctttctggctgattcctaggtacacgttcagtatgaatagtatgtgatgatgaaaaatatctatgatgagtgaatgaatattattattatttatttatttatttatttatttatttatttatttwtttttttgaratggagtctcactctgtcacccaggctggagtacaatggcaccatctcagctccttggtggagctgcaacttccacctcccaggctcaagagattctcctgcctcagcctcctgagtagctgggattacaggtgaatgccaccatgcctggctagtttttttaaaaacattttgtagagacggggtttcaccatgtaggtcaggctggtcttgaactcctgacctcgtgatccacctgcctcggcctcccaaagtgatgagattacaggcttgagccactgcacccagccaaatattattcttattttaaaataatatgtattcattgtagaaagtttaggagacacagataaagcaaaaaactagtaagactacctgttatcctattactagtgaaccaataaaattaccctttctccttttataggagatgtcttctttatagcctatgtataattgcttattatgtttagaatactcattatctaaaaatttccatattattattattattggttaagacagtccctctttgttgcataggctggagtgcagtggcgcgatctttgctcactgcaacctctacctcccaggctcaagcgattcttgtgtttcagcctccttagtagctgggactacaggcgcatgacaccacacccagcaaatttttgtatttttagtagaaatggggttttgctatgttgcccaggctggtcttgaactggcccaggctggtcttgaactcctggccccaagtgatctgcccacctcactcctgctggtattacaggagtgagccaccatgcctgayccaaatttccatattttaaaatgcctatacattttgttttaaggagcattcttcatcttgggctgaacacccaatatttcagtgyaggttgggaatacagcaaggttaatttagcatgaaatactttaattgctacagtttaattgtttgttttaaatggaaggtagttataaagcctccggagtttcagagtagccaaatgtatcagtgatagcacattatcactaatatatttgcatatgtggaaacagtaatttgtttttcccatgcttcatacttaaaatctacttaatctatgtttctaaactgtcaatctttatgcttagttttaaagcctaattatatcttgcaaaagaatactcaggtatcactttaaaattatagctgctcaacatcaatgatgtgagagattgatgggtgtttggatgcagacttgatcatgataacatttacttgggctagagtaattgtactcactttatgcatttaagtagcacttacatggtgcttactgtctgccaataactgttaataacttgttaatcctcataacaagcctatgaagtaggtcatatgttattgatgagaaagtcaagtcataaaaaggataagattgttgctagggcaaaggcaggattggaagggaggtagatggacttcagtgttttgtgctaacccaaactacactctgctgcctctcctaaaagttctgacagcaactaacatttataatgtgtactatttgcctgaccattctatgtgctctagacatattaatttaatttgtggtaataagccacccagcatgaatcaaaagtctgcattctagtttcaattctgcagtggactgatggtgcggtttggagtaactcattgtaccactttgggactcaagctaacgagttggttagattagatgatttatctccaaagttctcttctagctctacagttagaattttcaaactatcttaaaagtctcgaaaagaatgttttttatgtttctaattttaaattgagtatgcagtccagacttttcatctcctacactctcattcttaaaaaaaacccacacttttgtttgcttatttaagcaagttttaaatttgacagaaatatgtatatttcttagagttagatgccattaaaaagatataaagccctttgggcaaaaaactcccagaatgagacaaaacccctgaaaataaaaccaaattcacttttaatcatatagaaatttaaatttagaaattaacagttagttcaagaagcccaaatatgtttaataatagtcacctacagacaggcttttatggtccctttttgctgtgaacttatgcaaatatgttctaatttccataagcaaagggattttcagtaagtatctacgtatgatatcgctatatccttatgcaaataatgtcaattttgacctcgtcctaactgataaatgatctctcaggttgtttagacacagtgttcttgggaagacggtaaaggcagaataagaaaggtaagatatccaactctaagccagtgacatgatgaatatataatgtttttgttaataatattgactaattcactagtctccagtctccttttgcttctcagtccatcatgatctcgtgagttagaacctatttttttattttgcagattgcatgagggacagcagtcaaattttgaccccacctcaactctcttctagaatgaaacacattagacaagccatggccaaaaatcgcctccagtttgtacgatttgaagcaacagacctccacggcgtgtccaggtctaagactatccctgcacacttttttcaagtgagttttacacagttgtgactaaatgtaatttcatgaccattagcaagcaaacagttcttattactctttcttattttcttgtaatcttatacagcaattcaagctgaaaatcaataacttattttgtttcttcccttgttcctcccaaacacattattgctccccaaggagctaaacatgtactctcagctctcaaacagcaatttctttacccaatagaaatacaaaactaattgagactggtaattttagtcctgccttgaataattttgctctacagaattattttttctcccttactgcaattatgaagattatattttatttgacatgagaaaattgcaacagaagacccaaaagcaaacataaaaaggaaaaaatgattaaatagaaaatatttgctagataaaaaatgtattcctttcagctccaaattctgataagaaaatattccattgttgttggatgacttaatgaatattattaaattcccaaaaatgatgatatcaagaaatattgtgtttttgttgttttgagacttccttaattttttgtatcagtttttgtcatgtgtttattttgatgactgagttgttgtgttaattaaatatcaaatttcttagcaagggacatcaggtcggtactatttaagaaagtgtgaaagttaagcatcctctaggtttaactgtttaaaaatattacacttttatcacattaacatcagattctaatttttaaatttgtttcatgttggggaaaactggacatcttcaaaaactctttttaaataattctaacagattcaaacttgtttcttaaggaattatttggacctgcttgcagatattgtttccttgtcattcaggcaagaatacatgttgtttaatttttataaaaaatgaggattttcttgtggacaagcccagaatgtaattcaaatgagtctctttcaatcataaggaaaagtaactggcactttaactacttgccagagctcaatgtaaaactgtttgctrttcagtttttgtcaaattttaatcatttattttactaatggcacctaaaagtccatatataggacattactctagtttctcagtggaatccttttacaaaaataaaacagtatgctgcttatacttgctaaggattgatataattgacataaagagaaaaattctgcatacttttttttatccaactgctactgaaaatatttttcattattttgttcaatatcccacatacaaaaaacacttttattccttgagtttagctagagaaaaagtttatcatgagaattttaatgtaactcattatacaccttctcaatggctatatttattcttagtcccagtttcctaataactaacttccctatttcattacctagttattattattttgttctcatttaatgatcatagagtatctatatttttttaagaagccactttaaatttatttttgaaacttgtgaaggtataaataatgagtattagcacaatkaatatttgtaatttaagagaaaataatttattttggaaaatttgctgtgaatagacattaaaaataggtttaagaggccgggcacagtggctcatgcctgtaatcccagcactttgggacgctgaggccgacggatcacctgaggtcaggaatttgagaccagcctggccaacatggtgaaaccccatctctactaaaaatacaaaaattagctgggcctggtggcaggggcctgtaatccagctacttgggaagctgaggcaggagaatcgcttgaacccggaaggcggaggttgcagtgagccgagatcgcgccattgcactccagcctgggcaaaaagagtgaaactccatctcaaaaaataaaaaataaaaaaaagattcatctgtgcaaagtaacctaaatatcgtgtgtgtgtgtgtgtaccttattccatctcaaaaaaaaaaaaaaaagattcatttgtgcaaagtaacctaaacattgcatgtgtgtgtggtgttttaaggtttaagtcttacaaccaacttatattatctctgttctatcaatcaaaagggcagatttttatttaaattatatgcaataatgtaggctttttctrtatctgatctagccaaattatgatatattgctacaggactcataactaattcttggcttatttcaaaagatgacctttactatggtccaagtttcatttgtgataaggatttaagttattctgcaaaaattttattgggtccatagtgatctatattgaagatgaagttgttccagtgctttatatctataaacactacttaagacaatatattatcatgaatatattaacatatattcatatacttcccgtaactaatagagagtagtttgcattctctatgtccaagaaaagaataaagcaaattacagtgccagaaaagagtgttcaaaaaaatatgaattaaataatcaaaagaataaagtgtgactttttactatggtttgagttcatataggactattggagtgaaatggcaaccagctgttctctactactcacagccaagtgaatacaaacacagatttaaattgtaggaattcatagaagtctcatgaataaaatatattatttctcattttagatatgtaaagaactaatatacagaatttcaaactaaaaaactgacaagcagggaaatgacattattgcttatagtgaaaatatgaattaaaggattccatgctataatattctaatatcccacagtaagcgtgtgtgtgtgtgtgcgtgtgtataaagtttacatgtacaggtccatgagtgagctggaaaattaggcagacaccaaatggtgtttggctcactcaactttattattggttaaagtggagttggatcagttcagtcaaatagcattcaaaaatatgtgtagagatggtggaaagtggaggcagtggttcatgggcaaatgcggaagagtgaaccagtaaattactttggctaataccagcccctctttgatagccatgcttcttggggtctggaggtagcataagaaatagtctggcttccttccaccatgtaaggatacacaagaagaagccatatacgaagcagaaagcagccctcaccagacaccaaatctgctgttgcctttatctcgcacttctcagtctccagaactaaagaggaatgagtttctgttgtttataaggggaaaaaaagagaaagaaagagaaagaaagaaaaggaaagtgtctggcttgcagattgttagagtgttttattaacctcatgatcttcactgacttcatgggaaccaaccttttatactcagtgatttttctccatctattaatgtaaccttcaaccttgttgatatttctaatacataatttccagaaattgttttatgtgtctgttcaacttaataaccttatcacttccctgttgcctggcacagagcaaaagttaaataaatgaccaaattcactgaaccctagagatagatggctagaaagtaccttagcagtcatctagtctaacacttgttttactgatgtggaagctgagggcacataatccaatgacttgccgaaattcaccaaagcaattaacgaaagagctaggatgagaaggcagatctgttgacacccagttcatgctgacttgaaggctacaacattttggaagctataactttggagttataggtccacattcatggacaagggttctgggactctgagacagtgaggtttttaattcttaaatgggttgtaaaagtgaataaagagaggaatgcagctgtcagcgtcctggctcccctggtgttaggacaaatgtgctgtgtgccacagtactgaccatagtctgcaatttgagaaggattgagaattgtttactgtagacttttgagggtcagttaactcaggattacaataaaataagcaaaaagaaagccttatctgaagaattaacaactgtacttcaggaagcacttttgatgatgataatttcaaataattccataaggcttttcctttgttttttgctgtaacggattttctttatcattatacctttcatttataactgctattttcagatctaagagcatataaggccttcaaggcttaaaacaatgcattgtttataaagttgcctttgggggttttattttaaaatgtttaacatttatctgatatcaagttagtgttaaccaacaagtgttaaacatatatatatatatttattwtatatatatatatatatatatatattttcattagcaaggctttcccgccgccccccgacccttttgtttgttttcaaaacctaatttcttcatttttttccttctttargagaaagtgagccatggtgtttgcatgccccgaggttatcttgaagtgataccaaatccaaaggacaatgaaatgaatmacataagagccacatgttttaatagcgacatagtcctaatgccagagttatcaacctttagagttttgccatgggctgacagaactgcaagagtgatatgtgataccttcactgtgactggtgagcctcttttgacttccccaaggtacattgcaaagaggcagctgagccatctgcaggcctctggcttttccctgctttctgctttcatctatgatttttgcatttttggtgtgcccgaaattttaaattcaaagattatatcttttcctgctttaacatttttaaataaccatgatcagcccttcatgcaggaacttgttgatggcttgtatcacactggagccaatgtcgagagtttttcctcctctaccaggcctggtcagatggaaatctctytcctgcctgaatttggcattagctcagctgataatgcatttacyctcagaacaggtgtcaaagaagtggcaaggaaatataattacattgccagcttcttcattgagactggattttgtgattcagggattttgtctcatagtctctgggatgtcgataggaagaaaaacatgttctgcagcacttctggaactgagcagctcacgatcactgggaaaaaatggttggcaggwctcttgaagcactctgctgcgctcagctgcctgatggcgccttctgttagctgccgaaagcgttattccaaggacaggaaagacctgaagaagagtgtgcctacaacatggggatacaatgacaacagctgtatatttaatatcaaatgtcatggagagaaaggcacccggatagaaaataaactaggctcagcaacagcaaacccttacttggtgctggctgcaactgttgctgccggcttagatggacttcatagcagtaatgaggtcttggctggtccagrtgagagcacagacttttaccaagtggaaccttctgaratccctttaaaactagaagatgcccttgtggcactggaagaagatcaatgcctgagacaggctctaggagaaacctttattcgatattttgttgccatgaagaaatatgagttggagaatgaagaaatagctgcagagagaaataaattcttagagtattttatttagaatagagctcacaactactcctttagacatgtaattgttacttaaagmtaatctaccaaaacaaaaagactgaacttttgtaattaacaacagcaacaataacaagattacgaatgcttttgacttttttttttgtccatggaatatttgacagatgaagtaggactgctgagaagattctgataacagaaacaaacaacaaagttgtggtgaagctataatatgcaaacttaccagatcttgtcagtcatttcctatgtgtatgttgacctggataagaatatccaattttgggtggcaataaatatattcgcacattaagaaaaaaaagacttaagcattagaaagcaaaatttaaatgactaaaaaagaaaaaaaagaaaaggagaaaaaattttaatggtacacataggttatgatttccagggagacaaatatactaatatagtctcgctaatcaaataatattgtgaatccaggttgtatgcaccattatggtctttctaaacaagttaaataaacttttgccaaaatataatgacaggtaggcagttttcccctaagtctcttctcttttcacccttctccactagctcctgaaaagcttatgaacttcaaggttataatgtcctcaagaaacaaatccctaaggaatagaattggagctgagaacaacgaggtcagattttaaaagtagttaaagcctttcttttaacaatgcctcatatagaagttcaatacacaaagtatagatagaaagatgtttgtgtgtgagggtaggtgggctctgtctactctgcttcattctttgaaactagatgttcctctgaaacctctagtgctctgtggagtgtgagaacaactgcctggctagccagggctatgtttggagtttaagtttgttattcaaattactgaatctgctgctcacagaggttggtacctccccagagaatattacctgttccaggcctttgtttgaatgagataatattgtaactatcacaaaagtttagctgcttttgggaagaagtccaaaatccacttactagcaaatgaaacattattctactgcttaggatcaaacagcagattttatgttcaattaaaactgactgtagtctcaatttagatagcaattgcacaagcagaggattagaatttggctcagatcctcttattaaaattcatattactcagtagcttaaatagtgaaagtcagtctatccttcactaattactcccttcttttttcctttgagcaggagaagtgtgtttggatacataagaagaaagttcccagcactttgggaggccaaggcaggaggattgcttgaggccaggagtttgagtccagcctggaccacatagtgagacccctgtttctacaaaaaaaaaaaaaaaaatgcctcgcatggtggcacatgcctgtagtcccagctacgtgggaggctgagaagggaggatcgcttgagcctgggagtttcaggctgcagtgagccataatcacaccactgcactccagcttgggtgacagagtgagacactgtcttaaaaaaaagaaaagaataaaattcatggatgcatatggggtagagagaaagatagtgtagggtagctgggggaaggaagggaacctgtcctgaaacctccagaatgaaatcccacacattacatcatgggagggataaggaagactctcatgccaattttctagctgtctgctagaaaattcccctctgttcattttcccctctgttctcagtaataaaacctcaatatgttctttgaaagcaatgaaaaatgaaatgatatttctgagccttcattaaggttggatgtggtcatgttattaggttcagtgcaaagaggtgaaagtagaagtgttgcatataagttctttaggacattttcttttcttttcttgtattttttttttttttccgagatggagtctcgctttgtcacccaggctgaagtgcaatgtgggggggtcttggctcactgcaacctctgccccctgggttcaagtaattctcctgcctcagcctcccaagtagctgggatcccaggtgcctgctaccatgcctggccttttagtagagatggggtttcaccatattggccagtctggtcttgaactcctgaactcaggtgatcagcctgccttggcctcccaaagtgctaggattacaggcatgagccaccatgccctaccacactttagaacatttttttaaatgacggatgctgtgtgctctgccctttctttctcttgctgccttcacccttcctgctgagtggcctacagataatgtggctaggattatgtccttgggaagggaggtttgctccacaggtacagtaataaggtggaatctctgctttgtagagcagtttgacttgcctacatccagatgtttacctgagagagaaccaaacttctatcttctttaagccacaatgattttgattctttgttagttgcaatgaaatttattttctcttttccatgtgtgtgttgtatgtgtgtttgtgtgtgagtgtgtgcatatgagtggggaatttgagggatttggggatgaaagaacaaaggtataagaaccagtgaaagacgacttcctcaatattcccacttctagagaggataatctgagttaatcaaagggatccacacatccaaaaaatgggattggctctaacccatccctataaagtggcatatccctttatagtccacgggccttaatgaaacatgtctaatgcattgacttcattttaccataatgagtaaagatgctgtaaaaagtctgataatcacagtgtttgaagccgttttttcccctttcgcattattagcataacttaaaaacacagtactcaggatgccatgtgaaggaattatataactaggaatattatcttcagtattaagtgtacagtcgtgagtcaaagaaaatattcagccatagattacaaatcagttgataacgtaagttggtgtggcagtttccaccaagatttcagttaggtgtgtgctgatgtatattcttgttctttaaggcaacccaaaaagaggcattggccagcagagttcagggccaaagacaaattggggtaggtacatgtaaaaatcagttatctatttttctatttctttcatctgttcataggctttctattgttgaaaggactttctgctgatgcttctaccttcttggtctgggttaagagggtcagacattcattcagcagcacttattgagcaccatttgtgtgctaagccttcagctgggagccatcatactaggggagaccaaaacaaagatgagcagacaatgaaagagttttggatctgtgtatcttaagcagaacataaataattttttttgtagacctaatgctgaaaaaagctatttggaaagcttctttatggctcgaaaagggtgcyttataaatagctttacaaaaattgctttcttattttcatttactataattgttctaatcaaagcttaggggaaaaatgtgattactgaatttaaagttggtaattaaatgagtatacataagaaatgtaaattaaaagcgataatattttaagactagaaattaaaacattagtattgtagtaacaagtttctattttcaaggacattctataatctaaaatttcattttacagtgtgtgaataacaacaacgcttgaaatgattatttgaaggcaatgaaagatcaaaaaactttaatctgaataaaaattgaaagcatacagtgaagtctgagcttatcagtaaaacagaacagtctattgacatatctccagtcacctgtttgacaaaatacactcaccaatatgtttatgatataggtatgactggacaatacctttaaccttgggttttctatgacaggggtaagaatttgtgtctttaaacattacctatgtgcacagtgccttccctgttaaagctcttctcatgctgcctataattaggggtttacatgatacttcctaattgctaattaggatgtgaattctcagaataaaaggtacagatcttacttacatttgcattaatacttcttgttccttgcatatgttctggaattcaattaatgtttaatcaatcaatgcatatgttattagcatagtacaatactatgcttgtccagtataaaacacacaaattcacctacccagagagagggaggaatagagacagtggagaagtccaacagtttgtgtttttttattgatcctgcaatttctgccattagaacttcttcaggttttctgcttctagaaactcctgwgtaaacaccatttgattagcttgatggggatcaaaagaacaacaacaataaaaacaaaaacaaaaaagagcaaggtgaagttgtcatgctttttagccatgtggaacctttcaatagctctcttagatttgtggaatccctcttctttgggctcttgtctcagaaagtagaagtcagaacctcaccttcccaatttctcttgctgccattgagaggtgacagcgtgctggcagtcctcacagccctcgcttgctctcggcgcctcctctgcctgggctcccactttggcggcacttgaggagcccttcagcccgccgctgcactgtgggagtccctttccgggctggccaaggccggagccggctccctcagcttgctgggaggtgtggagggagaggcgcgggcgggaacccgggctgcgcgcggtgcttgagggccagcgcgagttctgggtgggagtgggctcggaggaccctgcactcggagcgaccgatcggccggggtagtgaggggcttagcacctgggccagcagttgctgtgctcaatttcttgcctggccttagctgccttgcctcggggcagggctccggatctgcagcccaccatgcccgagcctccccctactccgtgggctcctgtgcggccccagcctcccagacgagggccgccccctgctccaaggcgcccagtcccatggaccacccaagggctgaggagtgcccgctggtggcacaggactggcaggcagctccacctgcagcccctggtgcgggatccgctgggtgaaaccagctgggctcctgagtctggtggggacgtggagaacctttatatctagctaagggattgtaaatacacgaatcggcactttgtatctagctcaaggtttgtaaacacagcaatcagcaccctgtgtctagctcagggtttgtgaatacaccaatcgacactctggatctagttactctggtggggacttggagaacctttgtgtggacactctgtatctagctaatctggtagggaggtggagaacctttgtgtctagctcagggattgtaaatacaccaattggcactctgtatctagctcaaggtttgtaaacacaccaatcagcaccctgtgtctcgctcagggtttgtgaatgcaccaattggcactctgtatctagctaatctggtggggaggtggagaacctttgtgtctagctcagggattataaacgcaccagtcagcgccctgtcaaaacagaccactgtgctctaccaatcattaagatgtgggtggggccagataagagaataaaagcaggttgcctgaggcagcactggcaacccgctggggtctccctccacaccgtggaaggtttgttccttcgctctttgcaataaatcttgctgccctcactctttgggtccacactgcctttatgagctgtaacactcaccgcgaaggtctgcagcttcacttctgaagccaacgagaccacgaacccactgggaggaacgaacatctccagacgtgccaccttaagagctgtaacactcaccgcgaaggtccgcagcttcactcgtgagaccacgaacccaccagaagaaagaaactccgaacatcagaaggaaccaagtccggacacgccgcctttaagaactgttaacactcaccgcgagggtccggggcttcattcttgaagtcagtgagaccaagaacccaccaattccggacacaccatggtacaaggactctgccaatcagatgcagtcataaaacatggactccactctgctgagcttgagggaggcagcagcgacaggcatccatgggtgccatcctggggtggcattgtgggggggcattggtggtgctattgccagtgccagtggctgtcgggtctctggaacagtcaagcctgttcttctgaacctgattttctggccctccgagattctattaaatatctaatattttttaaataaatttctttttttcttaaagtagctagaatttttaaaaagaagcctgactgaaaaacagtatataaaaag

SEQ ID NO: 94296 - DNA, 199289 bp, Homo sapiens
  misc_feature (1)...(199289): n = A,T,C or G
aacattctcctgtctcagtgaatggccaggagggcggagaaaatgactataaaatgagaagcacatgcctggctggtgttacatgtgctacacaggccaaatattactcctgctgtttgctacaattatttgcaaacatcttgaactggtttttgttatttttccttaaatattttattctaaaaatgagaccatttttgttcatttactgcattttctaattggctattgcttgcataggagtaacttactgatttgtacatctttattgtatagttagcctcattactaactacttccctgataaaaaccacagtttattacctgggcatagtggcatgcctgtagtcccagctacttggagggctgagatgggagaaccacytgagcccacgaggtcgaggctgcagtgagctgtaattgctccactgcactccagcctgggtgacaaagctagatcttgtctcaaaaaaaacctcacaaagttgcaaatagtgatagattttgcctttacacctataaatattactatagaataaaaaagaaaactacaaataaactattttcccttgcaattctgctatccagttttaatagcaggttttgctaaccttgcagaataaattgagagggtttcaatatctttttgtactgcattataaataaaattgaggaataaactattttgtaaactttgtcaaatattctccattgcgtggttttggaagatgagattctgaggacccgttcaagatcttccggagattgttaatctattcgaaatacgtgcttattccttattaatttatattttgtttattatataaatacgttagcatgatatcaaggtaaatactttttctttcagcacacaagcacaagtgttgtctctctgagtctttgcttgtctgcaaatgcatttaattgtcaggatcgttgaatatcaatttgactaacagagaagcttatattcaaaaccttcttctcaaaaaattctgttgatgtttttccatcacagaatgaaggtgaacattcatctaccggatatttagtaagaagccaccctgcgcggtgctcttctaggcacaggggctaccttgcagcagtgaaagaggcagacactgactcctgccttgtggagctgaacgtcttgccacgaaggagaagaggcagtcagctaacacgtgggatgcctatcggtgcaaattcaaatagagctggaaggggatgtggagccctgggtgggttgtgtaggaagtgcctggagagttgcaacccagctgggctgagctctctggtgtcttccttctgcccggtcttggtttcattatcttagttgccctgttagttccctgtggctttaaaatatattttttgtaagcattttgtccatctttcctagatgtctcctgaagggctgtcccaattttcttggtctgctactggcgcaggcaaaagtgagagggatttttctggatccaccctctccccaatatgaccatctagattgttaatgttgccactttgtgggttttttttttaatgtgttacctgctgtgctttctacttccaagaatttttggctgttcctcatttacttcctttccatggcaattttatagatgggctggtctgctggatatctaaggacaataacagtgatttctaatgttattgtctgtgttctgcattggctctttttcctcagagaggggaaactcacttgggtgaagtttgctttttttttttttcatattaccagttgttctaaaacaatccagtgactcttgactgtaatatagattcatgcttatcattgcagatatcgaccagaggttcttaaacctggctgcacttggaatcacccaagaagcttttaaaaaatctgggtgctggggcctggtccctatgtgtactgagtctggagcaaggcttgggcattgcttgggcattagtagctcatcaggtaaccttaaggagcagccggtcttaagagcagctacttgaaataaccagcatgggacttgcagtggcatcctggatgtagcaacatggcggcctcgttattttcccacctgcgcctcatcctagaatggcctgctttctctgattttgagccttctcaagggatctactggaaaaactcacttttttaaaaaaagtgtccttgcttacttaactctgtaatatgttttcttttttcttttcttttttttttgagactgagtctcgcactgtctcccaggctggagtgcagtggcgggatctcagctcactgcaacctccgcctcccaggctcaagagattctcctgcctcagcctcccgagtagctgggattacagacgcgcgccaccacgccctgctaagtttttgtatttttagtagagacggggtttcaacatgttggccacgctggtctggaactcctgaccttgtgattcgcccgcctcggcctcccaaagtgctgggattacaggcatgagccaccgcgcgtggacaatatgttttctcatatgtgttagactttcccgctaatgtgttcatcagttttatgtattcctgacatccctcaatatcttctgagatatcttttcgtcttctgaaggtactttttcccagctccccagcacaactgtacatttatctttttgaaaaatatcatgtgttttgtaaaggaaatttagtttggaaaaacggagaacaaattatctcaggcaggcatatcaaactatgaattccttagaaattatggtatgtgggataaggaaaagcttaaaaataaaaaatataaatttttgcttctctctctagaatattttttttttttttgacggagttcactcttgttgcccaggctggagtgcaatggtacaacctcggctcactgcaacctccacctccctggttcaagcgattctcttgccttagcctcctgagtagctgggattacaggcatgtgccaccacacccggctaattttgtatttttagtggagattgggtttctctgtgttggtcaggtgggtctcgaactcccgacctcaggtaatccgcctgtctcgacctcccaaagtgctgggattacaggcatgagtcactgtgcccggccagaattttgtatttttaggattatgtacataatcatagatttagcttactcaatcattagtcaattacttttgtccaaaatttcacagctctgtattttggaagtttttggatgatgctgaggccatattaattaataggtagcatctgtgcctggtttttcatattacaaatttcagaatctggctggacccaggtgggaggattgcttgagcccaggagtttgaggccaccctgggcaacatagggggaccctgtctctttctaaaaattaaaaataaaaatagtttatttatttttgagatgaagtcttgctctgtcacccaggagtgcagtggcacaatctcggctcactgcaacctccacctcccaggttcaagcaattctccttccttgacctcccaagtggctggaattacaggtgtgcatcaccatgcccagctaatttttgcatttttagtagagacgagatttcaccatgttgtctaggctggtcttgaactcctaacctcaagtgatcctgcccacctcgtactcctaaagtgctgggattacaggaatgaaccaccacgcccagccaaaaaattaaaaatatttaaaataaaaattttaaaaatgtcagaatctgttatgcctatttgtaagggcagtcactagagtaaatattaaacaatgctgtcaggttaaaatgttttagactgtgattcttacttattccataattatttatttcaccagccattagaggtactgattcttggtatctgaaaactggaaacaatcttgatgattgtctcattcaattctctatacttcttagttggaaagtaacacccagagtctctttttatgccctgtgtgcatctcgcgcatctaggtgcgatctcatcacatagctctaacccccaggtgtctcccagcatcccccacagctgtgtcaccagtgtggacctttgctgtcatgtccggtcttcgatacgccactgcccacttgccatctcacacttaacatggcttatgctgagcttgcattttctccttaaaccacttcatttatttttctcactgaaacatccaacctgttggccagtcacattagctctgcctggaagacgtacttccaatttgtccatgtctgtctatccaatgccaggtgtaagccacctcttaatttacacctctcctgctccaactctgctcggaatcaattttctatctattaaaagagcatataagatcttctcatctcacgcctctctgcttggggcagcccatggctccctattgcacttggagcaaatccagagacttgtcctttccaaaggctagtgaagccctaaatgctggccactctgctgctcctcatggctaccctctcctgcatccagacctgctcttgaccccagactgacatcaccactgccagcacgactcctgctcctgagggctggtgggcacctccagttctgcctcatcttctgtcttcccaactcactagatgaaacttgggtttttagctgttgggccaccctcacctcctctcttgcacatcccacaaccattccaacagcatgtcccgcatgctctgaggaggctatgtcccacatccaccatggccacccagcctgagccacagcacctttgcaggatcactgcagtggccgctcgccacgacgtctcccttcttctgccctggccctctacattctatttacattgcagcaggagtgatctctggaaacctcggtaaagccacttgatgccacttctcaaaatcctcccaagctttccctctcgctcaaaagccaaaatcctcaccgggatccacaaggccccacatgacctcactctcggccacgtctccaatctcccactcagctccagctaccccggcttccttgctgggcctgaaatccctgaacgctccctatcccgccccgtgcttaccatttcttccctaggtgcctgcacagcttgtgtccctaggcctccgctcagtgttgcttgagaagcctccttggaccgcccaattgacaggagcaagagcaggatcccacccctcccagccctggtttcaggtgtcccttcattttctgagccatctttgttgggattcccacgtgaggacttagtgttccggggagcagaaacttactgtgtttcccaggtgtccccattgcctaaagcagaagctgtggggttgaaggttttagaatgagtgtgaggcagaagccccacctgtttcttaaacacattgagatttctccttctttgggaccttttgacagagctgccccctctgtctggaagcctcttccacctgatcttgtcccattcaggtttcaactccagtgcctctcttcgaaaaggccatccctcatccctcccaaagccctccgtgggctctcatggtttttcgttcagttgctgcagctccatgacaacatcttgtcctctctagctctccgatgaattcctgtgcctggaacattgccgggcatacagcaggggatgagtaagtatttgccgaacaaggacacttacagtggttctcatggcctatagcaggcccttgttagagccctgtggtgcagatggccaacccagagttgaccagaccacatcagagcctcatcctcgccccagcaggccagggtctcagagtccagctggcagaagacacctgagctcaaaacccctccacgattccccagatcacacagcttggagacctttccggaggtgagctgagctaggccttcctggaaatcctgactttgcactggggaagagcaggtggaaaaagattccagacttgaggagcattgtgactcacagaatcttggaaccttagagcggaatgtggatgggatgagtaaggactgttctgagaaggataaggagacctctcaccttggggctgggcctgaaccagggaggggctgaagaaaatcagcaagctggttcccctcagggcctcaagggacctctgcctgaggaatcagcatttggctttgtaagcaccaggagtactcctggaagctccagggtaagcaaatggaatgaggcggtaattactttggcaacagtgtggactggctgaagctgggagtctggtaggcgcggacacccctggagactttgggcgaagggtccacggggatgcctgtgaagacaggaggccgaagtgtagggaggccgaaggcctcgggggtcaccaggtggrctggtagaggaaaacacggagccatgggatgtgaggcctcaagactgcaggcgctgtgggccttcatttgcagttgatgctccgtttgggtttctgctggttgactgtgagacctgactcctttccccaacaatgcagacttcagccaaacctttccctgatctgggcctctacatstcaaaagcccacccctgtgactgggggatgggattattttcttcacacctgtcaccactctaccttctaacactgggttctgggcaacattgtggatggtggcaaaactgggcagagatgtaagaatgtcataactggagccgggtaagccagggtgctggaggggagggcctccccaagccagggtcctggcgaagacgtgatttgagtccatccagggcagtgccttgttagcaggcacccccaggaagagcctggggccacggccaaccgcccagccacggcctcctgggcaagaaataactgcttctcatctctgtacttcttgagtgggaggcaaacagtcacagccatgaaacatctgtggggtctcactgcggacgtgggggactcccagctcctttttccatgccgtgcttattctcccaccccttctcggatgccccatgatgtggaggggagcccttcgccccacacttctgggacaccctcctgacgctcccctctcctccccacaaccatcctcgcctccccacaaccatcctcgcctcccccgccgtccgggccatgacagccacctcagagctacagcgcacaaggagcgtttcggtcctcatgatttcccagggagggaaacagacactcaaatacctgcaaaccaaattctgtcttwgctatagcgatatatttctcctttccatgaagaaagaacagaaaaaagaaaaagaatttatttaggagaggaaggaaaggcagtaatgatgatggtggaaaggaaacggtctagttcgcccaacaacggaatctgaaagtggtgggggctgggaagtggggtaggaaagaagttcttagaggcaacgcggaatcgcccttcccagggctccccaggagcagaggtcctgcgtaaaaaagacttaaaaattggagcactggatgccatggatcctttggattttgattccagttgatccctggagtaaggtcctaaccggggtctcccgaggtcgtttcgccgtccaggatggagcaggtctggcccctggaagggcgcgcgggctgcttggggacgggggcgccttttctcgcgcttcgcggtttcctctctcctactgcaggcagcgcgcgtttgcagcgttttgggaccgaactgatgcttctgggaaacgaaactaaacctctctgaagtttccagctcgggctttttttgtttcccgctatccggcgtggcccagtccgggcgcggaacgagggcggggccgtggccaccgcggcggaaacgacccgggccgggggcgggcggcgaggacaagggggctctgtgcggcacccgcccagcttgcgccctggggactgcggccgggcggcggggctggacgggagtggacggggctgggcgcgggctgggcgcgctgggccggccaggcggcgcgctgaccgcggtctccgtgcgtcccgcaggcggggagctcgcaccgccgcgcccgggccgcgagtgatgataacctaagaggccggcgcgggcgggcgtgagcggcggaggagccgggcgcggcgacacgcggccatggagcgggagccggcggggaccgaggagcccgggcctccgggacggcggaggcgccgagagggcaggacgcgcacggtgcgctccaacctgctgccgcccccgggcgccgaggaccctgcggctggcgcggccaagggcgagcggcgacggcggcgcgggtgtgcccagcacctggccgacaaccggctcaagactaccaagtacacgctgctgtccttcctgcccaagaacctgttcgagcagttccaccgcccggccaacgtgtactttgtcttcatcgcgctgctcaacttcgtgccggcggtgaacgccttccagcccggcctggcactggcgccggtgctcttcatcctggccatcacggccttcagggacctgtgggaggactacagccgccaccgctccgaccacaagatcaaccacctgggctgcctggtcttcagcaggtgagttgggcgggcgggcgagcgagcgcgcggtggcgcagggcagggcgccccgggaacttggtgttgggcacagtgattggcaggggctgggtgcttagaaggcagctccactcagggtggagggcccggctgcgcgggacccggtgccgaccgaagccacagcgccgccaaggcctctctgtgcctccgccgcagctaaaggggcgccctggatgcggggacgcgtggggatcccctgtcactccgtgtcggggccagaatgatcccaaggctagaaaccgacggccgctggacatcctcatccacagccgctcccacctgaagtgaaaggcaggaaaagccagcctggccccctggcctgaagtccctgcctcagtcttcggccaggcacagtggtctctgaacagccggcacaggacagtaaagctcagtctgctaacagctcggctcaggacagcagcaaagtgaaactgccgccaagtgctgatatgtctggcacggcccaggtaccagggcaggggaaataacagcagtgtccatcctccactgtgagccatgagccgcgagccaggcaccgcccgrtagctgcctgcctaattttcttcatcttaacctgcttcctgggggaaagaggctgtggggtgtttgtgagccctgccacgggcagtaccaggggtgaccctgcgatggaccactcctgctctttttccctccctgagttttagagtctccggcggacctgtccagaggcctgcggccttttcatcctttatgctctccaccccaggagagccccttggtagatccatcttggagctgtgtccagcagcctggaccacctcaaggccctgtccctgagaaaggtgggtcgtcttagctttcctccaaagctcagcccatcgttacctcctgcctcaccttgcttgaccccggaacagggactgagatgggcttctgaatagaacattagcggtatctggcttccattatgcatggggagactctaggaagccctatgctctcttagtggcagattgttcccctaaaagaggagggtcagagtggctcctgcctcttaaacgtaggcattcacgaatgccttagacacaggcactcatagcttggatgaagccatggatgcgtgcctctgtagttgagtacctttcaccctcccagcaacactgcagtggttatgctccatatttttgtaaacagagtaaacgggttcagagaggttaagtaaacctgcccagtgtcacacagcagcaaggtcgtggtactgggatttgacccaggtcttcccgaccgcacagctttttgaatatttctttgctcgtgcttctgaaacttttgtaagagtcactgaaggcgcttgttaaaattacagttttccaaagtgtctcactcagcaggcctgggattgagcccaggaatgtattagattagcgtgcacgtaactcttatatgatggcccacacttttcagaaacaccactctgcctgctcccaagccttgctctttggccagtcagcaagcgtgactgtcattagaccgggctgtgggatttcctggcccctgttcaccagaagcctgagcagggacaagagcggcaccccttacacaaatgccctccgtgtcccctgagcgaggcctccaccacatagccctggtggggctcaacagttttaagcctttgcacagataccacttcctgttattactgagcccgtaactcctgtagcctcctttttagaaatacttatgcctcaggagaaatacagtttattttcagttggcaaagtgctttgaatccattatgtcattcgatccttatagtaactatcacacccatcttgccgatgaggaaactgaggttgggatctaaaagctattctcttgtctctrtgaccttgtaaggcttcatgggactttgaaactttagcttccatttggactacacccatctacgttcccctccccttccactctgcccttgactccagryatcttaactctccctcagactctgtcytcttccttactgaaggaactgtcagcatttttcattcacttcccagctgccttgaggacagtgggcgcaatgccctacttctgtttattgttccctgggaaggcaggtcaaattcttccagtcccagaaaggctggaagaggtggtgccaggccctggraatagaaggaggaggaggctggtttcacccagagtttactgtagggacagatggcaccatagggcatgtctaccaggtgaagtcctgggtggggctcccagccccgggatgcaggctccatgtctggcgaggcgtcccagtgcaggacaagagtctgggacggtggtgtgaggatcaggaaaatggtgccaagcaaggtggggcagagagtgggtgctgcagtgagagatcgggggcggggggtggacagggtcatggcacagaggttgagaacaggttctagggtacactggggtgaagcatcgacatgaagccctggctctcaggacctggcacccagacagcacagagcagccaaggaaatgmcttctgtgtcaggccaaggtctgtgcagtgcgtttggttgactgcagagaagatcagacgcacgactgtgaactgtctaggtctgttttgtgtggcgcttcctccaagtgttgctgctctagctgctgtgcataggagtgtcggtccaagcgtgcaacacattgttcacgcagagtatgagcagactttagctggaagtcttacctgctgccactgtcccagaagtgacttctgggacattcccttgtatgtggatgtgcagcctgtagtgcgtcatcgtttatgttattatttatgtgctgtttttcagtgacaccatccttgggcccctttctgtgagaatccccttagagcctgttagaaatgtagcttcctaggccagggtgtttgagaagcagtcctgtttcctccttctgaacccattttctcctaatggatttcacacgctatttaggaaaaccctcttgagccacgctcagcaggttgggggagcactgggtgattctgggggggttaggtcctgcctgtggcgcctgcaggggggaagggccacccacccagcgtcactaagctgtggtccactgtgatgggagggtgtgggaagcccctctgatcatatggacctcggtgctggctaaggctgttcagagaagccatcttcccacagccccgggtgggaagaaaggggctgcctgcgcttgagaccctgccactcagtgagccctggtgagagtcgagggggatgtggcctccggctttcatttgaggcttggacttccctttagctgacatcggtctccaacactgagtgtccagctggaacagggtgggcatccctcggggccgagagctgagggggcagcagagcaacctcaggggtcctgctgggcagggctggaggaggagaggggaagagaagggcaaagggactcagcccaggctgggagagtggcgggcagttctgcaggcaggaagcagagatctcctatcagargaagactttgtgccttgcagaaagctttctcatccacctcttccacagcaggggtgaggggggaaaccttaaatcagcagacctggagccctgctcccagaaatggagtgtgccttgcaagggtgctgctggaggaggacctgggccaktgatttcatctgtcccccaaagcctgcctaggctattgttatcttttttttttctcccttttgcttctatgtactttgtgatgactcgaatataatcttattgacacctttcagtgtctgtctccaggatgatgtaaccagcagtatttctgcaggaaataaccggaggcgacttttccctgaatcttctgggctctgtgcttgggtctgagggcagcatctcagtgtctttccgtcatcttttgggaaacaggtagtcaggaggtgctctctgcttattttggaattgccctacttttggtctcttcccctcactttgattttcgctccattttcccagcccaccagggttatttctccaacccgtgtcccctgcccttcatgctttgttgttttggaagagctgagcagatgagaaggtgagcttctcactcaacaaagtcctccttttgttttcttttctgccagggcttttgtttctcttgtctcccctctcctactccktctccgtgcctctttcccttcccttccaggtgagcctcatctcttcctctgtggcacccttggctctttcatggcatattccctccatccctccctcttaatgcaacaagacagcagtcaacacatctttcccctgggaagcacagcatctctgtcatttgggtaaaaggtttgcaaaagcagagacaccaggacaagacccaggagttaagaatgcgcagggaccacgccagttcttcttaagcagggttgacatccctgtaggtaggttagsgcactggacgcttgcggaatattatttccacattgccattcacatgtttgttggaaataatttttcggtacctgttacatatcatatattactgggctcatgaggtcaagttgcagtggaaaaagaacgtttcttttcctaaaaccttggttgtcatccaaaggcaggcttgttcatgaggcagttcyttttttacttgttaatatgagccaaatgttctatatgcacaattccattttatcctcccaacgatcatatcatttccacatccccattccacagatgaggaaactgaggcttcaagactcaatagcttgcctaaggtcacactgttaggagatggcagtaccgtgatttgagcccagayctaccctgctctsaccccgtgttcacagttattaccttacttggtattcccaccccaagaacaacaggcctctttaaaataattattctagaaaatttcacatacatagaaatgtgcacatgtracaaactgccatgtascattgtccagtttcaacaattagcaactcatggctaacattattttatctgtattcccacctactcccttctcctctgtcattctgatgcaaactccagacatcatgacgtttcacctgtaaatgtgtcagtatttgtctttagaaaagcatgactcttcttaaaactaaactataaataccattatcatacctaaaaaaaattrttattttttaagacagagtcttgccctgttgcctaggctggagtacagtggcatgatcacggttcactgcagcttccatctcttggcctcaagtgatcctcctgcctcagcctcctgagtagctgggaccacgggtgcacgccaccacacctggctaatttttcttaaaaatttcatagagataaggtctcactatgttgcccaggctggtctccaactcctgggctccagctgtcttccttccttgacctcccaaagtgctgggatgacaagcctgagccagtgtgcccagcctaatttcctaatactgttaaatacccagtgtgtgttcagatttccacttatctcataaatgggatgtgtacttttcaatatgtatgcttgaattagctataaatgaggcctactcagcaggtggctgataaatcttttaagtcacttttagtctatagattttcccccagaaaactctattctctttctttytttcccttgcaatttattttgaagaaattgggttatttgtcctatggggttttccagggcctgaatactgctgattacttctgtgtggtttcaggtaacatgttttttttctattgtaattcctgtggattggtaggagggtctgcacacttcctcagtgtttcatcaggctcaggtttgaatttttgttgttgttgttgttgttgtcrttgttttggtctccacattcctaggtggtgttctgcacttccattaggagacacgtgtgcttacttgtctttttgtgatgttgacagccattgatgatcattgcctatatccattgatttgttagaggttgccaaatggtggtgtcctaatttattataggaaatacttttataaagagacacttcccctcatctactccctggtttcccagtggtccagcctgtatagtaaaagagaaataagtgcttgatattggatcactaacatctaacgctaactctattagtccattctcaggctgctatgaagaaatacccaagactgggtaatttataaagaaaacaggtttaattgactcacagttctgcatggctggggaggcctcaggaaacttacaataatgacagaaggcacctctttacaaggtagcaggagagagaatgagtgcaagcaggggaaatgccagacgcttgtaaaaccatcagatctcgtgagactcactcattagcacgagaacagcatggaggaaaccgcctccatgattcagttacctcaacctggtcctgcccttgacacgtggggattattacaattcaaggtgagatttgggtggggacagagagccaacycatatcagtaaccagttagctttcyaaaattcttaagctttttactttgaaatcattttagacttaacagagaagttgcaaaaatagtacagatgcataccccttacccaccttcttttaattttaacatttaactgcactataattttcaaaaaccaagaaaataacattagtacaaagctattcactaagtcacattctttatttagatctaaacagttttccattaatgcattaataagttttggtcagtatgtttacatgttgatcttgtgtcctgccacctggctgactcacttattatatctaataattgttttgtggcttccttagtcttttccatatagaaccattcatcagtaagcagagatagttttacttattccctttcaacttgataccttacatttctttttcttgcctgattgccctggctagaagctccagtataatgttgaatagaaatggcaaaaatggatgtccttctcttgctcctgatcttagggggaacgcatgcttttttgccattaagtatgatgctagctgtttgcatgtatgtgtgtgtgtgtgtgtgtgtgtgtgtgtgtgtgtgttttaaccaatactgagatttcaagctgtggggttttatagatgctctttatcaggttgaggaatttcccttttgttcctactttgttgagtgtttttgcatcaagaaagaattttggattttgtcaaaggctttttctacgtctgttgaaatgatcatgtagcttttatgtgtagttcaattaatatgacatatactcattaattgattttcaaatgttaaaccaatcttgcattcctgggataaaacttacttggtcatggtgtacaatccattgttatattttgctggataccattgactagaatgtgttggagaattttgcatttgaattcatatgcaatatttgggattgggggccgtatgtgtgtctttgtctggttttgatatcagaaaagtactatactggtctcatagaatgagttggggagtgtttccatgtttccactattttctttttttctgttttttttttttttttgtgagacggagtttcactcttgttgcccaggctggagtgcaatggggcgatctcagctcactgcaacctccgcctcccaggttcaagcgattctcctgcctcagcctccgaatagctgggattacaggcaggcatcacaatgcctggctaatttttgtatttttctagtagagactgggtttcaccatgttgatgaggctggcctcgaactcctgacttcagatgatccatcctccttggcctcccaaagtgctgggattacaagcgtgagccactgcgcccggcctgttttcttttttggaagattttgtgaagatttggtattaatccttcattaaatccttggaagaattcaacatggaagacaacttcagtctgagcctgggcttttctttgtgyggagttktaaagattactattgcaacccatttacttgttatgactcctttcagatttactatttcttctcaagtcagttgtgatagttgtatctttctaggaagttgtccrtttctttgagtcacataatttgttgtcatatgcacttggtatgcacttgtaatcctttctatttccatgaagtctgtagtaattattgtagtgtggtctaatagggattttctttccccccattccttctctattgatgaactagaattcttagaacagctgtttttctttcttattgatttgtatactccatgactgatgtcattgtagtctactggaaatttgttttattctggggatgatcagtggatattaatgtaattgatccttttgctcacactgttccaggctgtggcttttgggagctctttcaagctggctgtcctgtccttcacaggccccaggctttcttctttctgaactctcccttactctctgactacatgggctgttccaggctcatctattttggctggcccagctctagaaccaaccacttctcctgagggctatataacttttctaaaaaatatattattatgaatttgtggatttaaatataatttattgattttagttcattgcagttattactgtaattgatttctttggtcagtaggaaccaatcaagttgtctcctgagtctttttttttttttctttttttttctgagacagggtctaactctgttgcccaggccggagcgcactggtgcaatcatagctcattggaaccacaagtggtcttgtttttggttgttttgttttgttttgttttagctgattcttttggattccaccaggtcttgccatttttaatgcagttcttctgtacctttcagtggcctttgaagccccacctgcctgttcctgggtgctatgccatggcctgcatggtgctcatttaatggtcattcattgtggtgattgtcaattctcaggttccatccttcctgcaagtaaggggtcaggggtctcatctgggggggagtacttccttcccgacgtgttggtagacatttaacaatcacagtgactggcagtgtccctggcactggtactcacaaccggggttactggctgacatgtgatggccccacctgcccaggaaggtcctgccccattgactaccctttcccaaaggccagtcaggccttcactgagaagcatgtttggaagaaccttttaaagacagggcttccccacgttttgggaaggttgaraaggggctgggtgactgttagactcctgctggtcacaacatggtgcttcagcttcttgttgaactcctgcagcaggggagcccactgtgcacatttgtacaagactcaccttgccatatttagcacactgacagaacttacaggaagcatgaagagctattttgatttctgcttttttagaagactcttagcctgactttctatgtttacttgttttgcattttcccggagtgcagtttgtatgaattaccctgcacataccttgtggttatttttccactggggatactgtattttggaacattttgcctaccaaactatttttattaggcaattaagaatttttgtcctcattttaagttagagacaattaaaacgcccttgtaggggctagaggaaaacttctcctttgccctctgaaagtttgctggaaatcaactgacaaagggcagattaacaggagaaaaggcaagcacatttattaacatgcatagcacagaagaactgtgggagaatgattgcccaatctcagtggagtacgcagggttatataccctccttctcaagggaaagggagatgggaagtggggatgattgtacaggggtagtaaatgagttttaggggaattcactgtgcttgaagaacacaccatagtctgggccacagtctttgaggcctgcataacagacagtggtttgtgacaaaagcctgtccagctgtgttgacagacttcagtttttcttcccacaatatgaattcagttaataaaaacctgttttcctctttggagtgtctggattttaggtttagggagagaagggaacttcggaggagttcatcttgggctttgggtgagacagaggattgagaggtgaggttggggggcggttagagagacgctgagggttctacagttcagcgcatcaaagtgccatattttgcgatattggttcctgagccccaacaccctcaatgaggtcagacccttgccagcagttagatgctaggcagaatgcatttctcttcatcccagtgttcttatttaaattggagggaagatggcattcaataggagggagtataacattactttggagggaggatggcatttaacaggagggaggatggcattcaataggagggaggatggcacttaacaggagggaggatagagggaggatggcatcaaattggagagaggataacattaaattggaaggagggtggcattcaataggagggaggatggcattaaattggagggaggggaagagagaagatagcagcttctggtgtgctgtgaggaatacatgaaataatgcagagagggtgggctacagtgccaggcaggcaggcaggkaagaatttgaaaagtttagttgcaactcattagtattcctgttacaactgctgtcattattgctattaagatcttttgatcaaaataaacttcctcagtttttttaaatttctaaaacagttttatttttagagatgaggtcttgcagtgtygcccatgctggtctcgaactcctggcctcaagcaatcatcccacctcagctcccaaaatactgagaccgcacctggcctgtccacattgctaagacactgaattgtgcctccaagcccaaagaattttaggtgtcatttagctgtatacttgtaccatgaggaaatggacagcttttggaaagaattttgaaatattgggaatagatccgatccccactgagaattttgaggaccactaaggatccagagataccctctgttggctcaaatgtcttctgaaaaatgtacctcactagaagaagcattctggggaaatggtaacatgaaagcattctttgtttaaatggcaatgtggcgtatattgtaaatgaaattggatttggtaataaccttttagggggaaggtttgttttgaaaacataaaatgaagtaaattcattggcccatttaacgatgtctttgattgatttttgcttatcaacagttataacaataataatwaaaaaaaaaaacctaaagtaagtcttggttttcaaaaggaaactcaacctaggccacgaatggagagccttggaacagagccctccatgcaagtcttctcagaaaggtgcttagtaggtgctttggaggcccgtgagctyttgcatagtagggaactttagatccgctcagagacctgccttatttctgtttcagcatcagatctgcctgttgtatagtaatctaggacttttctagaaaggtcctggggtgcgaacggacctcagcgtgggccaggccagacttgacaaggctccctccccaagttcggcggagtccccgagatccccactcacccctccccagcctctgtttgctttgcttcccccaagaagtgatgtctggcatggaaaccactgcttctaaaagaatccagtacacgaggggttaacgaaatggcaggaaacccaggctgtcaccgcacatttgaactgagtcatttgtagagtttaaagcatttcactacttttatgtcctgccttttgtttttgtatacttctaataacagtttaaaaagtcaggggcaggaaaggtaaatgtaagttccaagttccatcctttgttcagatgtgatctttgggcccttaggtgctctgtgcaggaggggaggtgagcgcggccaggtcttggggggtggtgggcgtggtctcgccctgcccgggccgcggagtgagtcaccggggctggggggggagggagggagggagaatggagcagcgctgggtccgctgccgccggacgctctacacagttccagttctccaaaactggccgcgtagaatggcgcctggggactcgcctcgcctgtgggctggcccccagggtgtggccacatccctttttctgggcctttcccttcagggctcggctgaggcggtaccagacacagccggggcctctcctgttgctttttgccaagttggaaatcagttttgttccccgtacaaaacgcatccacgctgtctgtctcggtcatctccagtgctgcaccttggcccaggagcatggttgactcagaaaaccgagagcattgtgagaggaaagacgaggcagggagagagcgagctggggaggcccctgttcctgctgggtgctccccactgactctctctctctgaacaagccaaccatttttgaacataagtcaaagcgatattttccagaatgtctcatacacataatgggctacaattgttcacctccactgaacagtttcaaaatatacgtggcatgtaattattttctcaaaaagggtaatcttatcgacctgcgtgatttaattatatttagttatgtatgtcttgtccctcataattaattggtagaaacctaggtaatggcatttcatagtgccatcgtgtcattgtcattattttatttattcgtgttgccaggacagactttagtcaaatcagatgtgtgtgtcttttttaactctcattgtgacttgcattgtaatattttccatgtacacatttatttttttttttggaaagaaaatcattgcttttaagcaggatggaaagtttgattcattccatagaaatctggctgctgcctgtggtctttcacatccatggggagcatgtctgggggccaggaggccatgctgacagagaccctcaggttctctctggcatggaggtgagagccagagttgagctcagtcctgcagctgcgccgtgctcctccttgatcacggttaaattcctccgtttctggtcttttctctttttctcctttcagtttcctatcctgtgttaattcctctgtaaagcgtctggccagacttaatgggaattccttcataatgcgcccttgggacttggagaaggcgtagaaggagggagggtggtgtctgtaattcttggctctgttcccaactactgcatgcagtgacatctaaactcagttcctgcttattcagtcctgtactaaggatgtctttttattttctcttgtctggtgctttgacatctggagccttgctgcctccggagggacaggccctcccagggctagataattcctagagatagcaaacagcattgctgcagcatgccttacgtgtgcaagccacccaatccaacgtccacaccctcggccccctctgtgtttcatccactgtgcacctgctctcgtcaccccaggtccagccaccaagcagctagggacagccctttgtcccagggtccaccgaggttattcaaactaatggattctaaacctgcttaccccgcctctcctgttctttcccatggaaggcacagaaaagactctccctcctctcaccaaggtctctgcctcctaggacgctggtctcccctatgttccccctcccacagcggtaggtgtggcgagctccttctctggaggactctgagtaacaaatcctcttttcaatggcagtcctctcctgacctgtcagccccatagtgcttgaataataatagaacttaaattgtaaaacatccctggagctactgccctcccttaggtccnnnnnnnnnnnnnnnnnnnnnnnnnnnnnnnnnnnnnnnnnnnnnnnnnnnnnnnnnnnnnnnnnnnnnnnnnnnnnnnnnnnnnnnnnnnnnnnnnnnnnnnnnnnnnnnnnnnnnnnnnnnnnnnggtgccaccttaactgcagccaattctaattcccctttctcttggaaaaagatggggagattattctggagtgaattgtgggcccagtgtaatcacaagtctgtaaaagtggaagaaaagcgggcagagagatccgatatgaatactacttaatttgccattgttggctttgaaagtggaggacctagagtcaaggagtgtgggcggcctctaggagctggaaaaggcaaggaaacattctctcccgccgccctgccgaaaccatcgttttgacccagtaagatccatgtcagattgacctccagaattgtgaaatgacagatttgtttagccggtgcagtggcacaagcctgtagtcccaggtcctcaggaggctgaggcaggaggatcacttgagaccaggagactggggttgcactgggctgtgattatgctactgcactccagcctgggcaagaccccatctctataaaatgaaataaataaaataaaactccccaaatttgtgttacttcaagccaccaagtggtcataatttgttgccgcagcgggaagctaatacatgtgttcattgcagagtttaacaaacagataccatgtttatttttttgtttgttttgcatcctcattttacagatgattaaaaaaaaaaacactttttagaggccaggtcttgctgtgttgccaggctggtcttgaacttctgggcctcacacagtcctgcctcagcctcccaagtagctggaaatacaggctctatctgccatgcctggcagaaaccaccttcttaactacagctttttgtgtgttaatattgattaagatgatttccgttaaaaaatggctgtaggccaggtgtggtggctcacatctgtaatcccagcactttgggaggccaaggtgggtggattgcttgagctcaggagttggataccagcctggaaaacatggcaaaacctcatccctacaaaaaatacgaaaaattagctgggcatggtggtgcatgcctgtagtcccagctgcttgcgggactgagattgtttgagcacagaaggttaagagtgctgtgagacgtgattatgattgcactactgcactccagcccaggtgacagagtgagactctatctcaaaaaaaaaaaaaaaaaaaaaaaaaaaaaaaaarggctgtagctgtttgaattagctaggaatatatggaatagctccaaattgcttagtgggatcatgaagaccccgtgacccgcaaagatcatgatacggtggaaaaaaggtgctttttaaaattgttgttcaaatacttagtgataaaacttcacgtatttctctagcaccatatacttgcctgaatttttatgaatttgtatggtaccattcttagctagctctgtgaagagcttataaattcttcattgttcctgtgaggaaatgggagcccagagagggaggtttcagtccaaaaggggcagagcctgggagcagaacaggtggccctggggctctggggtcccaagagatgttactcagggccactggctgagtgcctgcgcstgctgctcagtcagagcctcctgtgtccctttgatctttgatgtgtgtggatgagatcaagttgtttaaatatttctggcttttgagaaagtgtctaacaccagatagttatcctgataaaagccaatacccagaatttaacaaggatagctgacaaagatgctctatggatgctttttagaaaaatgtatatgttattgatcctttttagtgtagctggttcattacagccacagtcttcagatgtttttgatctcacacctctatcagtaaaaagtgggcatgtgcacccaaagtgggggtgtgtgtatttatttataaattaccggcatgtaatgcataaatatcttatatctattgaaacatacaaaatataaatgaaaataaaataaaccacaattacaaacaaaggtggtagtgtttttctgcactcctgtgatggtgtatgtttttgtgtgtgggcatcactttaggcaccactacccagaacatcttccaggagctttatgttgtgatgtcattttagatcactgaaggaacattgcacgtgtcaggcacgtgtccggcacatgtcaggctaggtgattctcatgctgtctcttttatccagggatgtttaggaaggcttgaagaacgctcagcagtgtgggaccaccaccatggtctaccctcatgcccaggggtggcccttctgcgctgagcatgtcagttctgaaggttgaggcatgaggggtggggcgctctgactcctccacttcctggaagtggaccacgtgctaacttggggcttgtcactgtcacactgagcagctgagctgtgctccactggcacacacagccttataaccttaagcgtgttctatcttgtgctttacttttaaaaaattgttttattatggtgaaatatacataacataaaattagccatttaacccttttaagtgtgcagttccgtggaattcaataccttcacattgttgtgagcatcaccgccgccctcctctccaacactttttatcctcccaaacggaaactttgtgcccgtgaaacactaactcccccttcccccatgcccagcccctggcaacaaccgttctgcattcagcctctacgaagtggactgccctgggtgtctcacgtgagcggaatcacacagtacttgtcctttagtgaccggcttatttcactcagcatcgtgtcctcaaggctcatctgtgttggagcatgtgccagagcctcctttctgaggcggacaccattccattgcatgaacccaccaccacatcttgtttatccattcatctgttaagggacccttgggcgcttccaccttttggctgttgtaaacagtgctgctgtgaacatgggggtaccagtgtctgtttgagtgtcttgcctttttcgtccttggagacattctgcatggattccgggacggctttgttggggtggtgcctagggcagcatgcaccctggggaccctcccacggtagcatttgtgctgctctcaggacctctagggaggtggccccttaactcactatgctgctgctgccagtggagaggtgtcgggccctggctgggtgtttactcccctccctgtagtcctttggccagggagcccaggagagttgctgtcagcatgggtggggtcgggtgccctgtctgtggtcttgttgcctagatgtcatcccacactttctctcaaccttgacacttcttgtaaggccctgctctctggtaacagggacatgactgtgagctcgaggcagagtatgcaaaacagttccggggaggctcagtgtgtatgttggtggaggtggccgggccttatcacagttaacttcggccatcacccaggtggcctgacacacacacacacacacacacacacmcacacaaacacacaaacggtccgtgctgatttcctgattttgaaggcttcacttggtcttcttggccttttgttgaatatgtcactgccaccttcgttaatacattcagtctgtgtcccttgtgcgtgcccagattcctggcagtcagcagtgagaagctgcctgccagcgctccccgcagttcccaagaggcaccagccagaggggctctgtgagaggcgaggtcttgcttggtgagtgtccacctcatcacacactttctcctggtgtttgggggggatttgtggagaaccactttctcygggtatttggtaggagtttatggaaaaccttttcattcatccctttgctatggcccttgttcaggcctgtgccccttggataaaatcagaagcacacagtgactggggatgggagggacagggagaacagccatgcctgaaacctgtcatttaagacaagctgaagccacctcatgtgccggtgcaggctgccagcccctccttgtctcattttgcagacaggggctaagcatgtccccagacggcaagccacagggtccacaagtgctggctgtttggcagctcgtgcacagccaggtctgccctcctcactgctcgcccaccgcagcctctcagggtggtccagccaggaggggcaggagccctcttcttcctttgccactcagggtgcatggggcgggcaggaggatcaggttggggggctgcaccctgagtaagtgcttgttctccctacattttaaaagctcacaggaaaatggagagtttttcctgaaagaaaacaatttcaattatttggtttacttttgattacctggrcaattaatatccctttattttaaaatatgacatcataaaatcaaatggactaggaacatggtgataaaatagaaaaatatctcttaaacttcctcagtttaggaagacccataaaattcccttttacttgcctcataatttaacttgaggttgcagtttatgagtcctccctttcgtagaggctccagctggcaaagacgtgccgtggagagaaacgcaccacctgttccctcagggtcccttctactgaatggcagattctcccctcgtctttatgaaaatgttcaaattgcagtgttgtgacacataccccttgtaaataacaaatatgcgagcaaagtgtatgacagaggtatgttttaataccgtgtgctttgtggccttgtatcattagtttctgaaattttgactccttcatgttcttggggtgacagtaaaatcaggtgatctctstattcgatttgtcttgaacacaggtatccactgtggtgggcgctgtctcagttttggcggtgggtgatagtgtcatttcagacaagcactctaaaacagctccgcgagaccatgggaagcaggaaatcggctaaaagggagactccagcccttccagtgcctggtccgtgttcttgaacttagtttcttgtgttaaccggaaagtgcatccaaaaatagcttctagagttagtggggtctgcgacgggagctgtgggcatggcatgattttcccagatagctcagatgggagtttccctgtggcagccgtgcgtctgtctttctacaggggaccagttttccttgaatayccccaaaggaccttttctactctggatgcctggataaactctgagtagatggagtctgggagggatgtttataagaagctgtattcactcataggtgtctaagagggctctaagcctctgtgcctgcttttgctgtgatgcgggatgcaaatgatgaattcctgcacagagaggagtaactcttttctgcaccaagtctgggctctggtttgggaaaatctatcatcctgtctatacagaggcacagttcagccagattcttggtgaatttatgatgctccccactcccygtttaaatcacatctgtctctctccacttgcactgaggagtttccttccatctctgaactttgacatatgtggagctgtgctcctgggagcctctgcacacactgatgtgggtttgggtggtgataggtggagtgccgagatcacaccccgggacggtgggggtggggggtggggggtggagggtgggcctgcgtctcctagggttcatggcagccctctggtgccagggaggaggcacatggcgtgactgcgctggacatgagtttagcttaatttcgtgccaactgttggcacctcctggcagccactcagaacaataggttttgaaattctggataatggagggtgatcattttgatatttaagtaagcctgcttggccaggcaccatggcttgtgcctggaatcctagcactttgggaggctgagataggaggattgcttgaggccagaagtttgagaccagcttgggcaacatagtgagattccgtttctataaaatgtatacatacataaatagccagttgtggtgatgtgcatctgtagtcccagcgacttgggaggctgaggtgggaggacygcttgagcccaggagttcaaggttgcagtgagctatgattgtgccactgaactgtgagtgacagagtgaaattctatctcaaaaaaaaaaagtctgcttgattatggagtcaaagacgtttacctatctatacaatcagagataatgtttatgactgagacctaaaagactgttgacatattcattctattcatcctagtatgaaaatcatttggctcctatagaaatatcmcccaaaatacraggaaatgaaacccagtgttttattttctaggcagtgcactgaaacacggtagaaaactttaaaaacaggggcttctggttttagaacaagatggcgtagattcatttttccctgctcctccccgtgattacaagtaaataatttaacaagaaacagtaaaaggacgctggaaactaaaagcaggcagactgactggggcctcaggacatgagggggtagcaacaccatgagaccctggacttctgttttatctcctgtatccttccagtgtgggcacaggaaggcctgtaaccagaaccgccaacaggtatagagaaaacaaaataaagcaaaaccaaaaggctctgtcaggccaaaggggaagctcagtgagacctagtgggagcccaaggcccgctccacacccaagccaccagtggacarcctgatgctgctgtgtggaccactccctatccggtggctccaggagacccagacccaggggcttttscccatccacccacaccacagcaacaggtggcccagggaactgccttccactcctttatacagagcatttacaaaaaacctacaaccaatttcacagttgaggatgaaagactgattctacaaaacccaaaacaaaacctcttacaactgaaaaatgagctcattacaatgacaggatacaagatccgtggctatgaattgactgcatttctgtatccccacaatggactagtgaaaactgaaatcacaaacataataccatttacagttgcaccaagaaaataaaatacttacatataagtttcacaatgctcatacaggatgcaggatgaacattacaaaatgctgatgaaaaatatcaaggaacatctgaataaatggagagacttcccatgttcatggatcggaaaatgaacataatagtgagtcagttttctctataattatctatagatttaacgtaactcctatcaaaacctcagcaatgttttttttttttttgtagacatacacaagcttattctacgtggaaaaacacaggtccaaaaatgtccacaagatttctcaaaaagaataataaagtggaagcactcacttctcccaatattaatgcttactgtggagctgcaaagtgtggtatcagcaaagggatggcacatatgtaatgaaccagagtgaagaacccagaaataagtcccaacagatatgcccaattagtttttgacaatcagttcagtggaggaagtatatagttttccaataaacggtgtgggagcaattagacatccattagaaaaaaaaaaaaccctaaacctcacatacctcatataaaaattaacttgttaaagattatagatttaaatgtaaaacgataaaacttctaaaagaaaacataaaacatttttgggatctaagactagacaaagaattcatagacttgacaccaaaagcattatcctttgctgtgggaaagatccaatgaaaaagagcagagaaattccagacgagagagaatatttgcaaatcacatacccaacaaagcactaatatctagaatacgtaaagaactctcaaaattgaacattaacaaaamaatgaatcctgtttaaaaatgggcaagacatgagacattcactgaagaaggtatgcagatggcaagtaagcacatgaaaagatgttcaacatctttacaaaacagggaaatgcaaattaaagccactcagagataccactgcgcatctatcagaatggcacaaataaaaagagtgataccaccaaacgctgctgagggtgtgasaaatgggatctctcctacgttgctgtgggaatgtaaaacatacccactctggaaaatagtcccttcacaaaactaaaaatagaattgtcatataatccaccagttgcactcctgggcatttaccccagataaatgagaacttacattcacagagaagctttgcagaaatgttcatcgcagcatttttttttaaataataacccaacactggaaataacctagatgttcctcaaaaggtaagtggttaaagaaactgtgatccctccatacggtggaatactagtcagtagtaaaaaggaacagactgttgataaacacagcaacttgcatgggcctcarggagatttyggtgaatggaaaaagcctgggagctaaatgatgagaattatgaacagaaagaagggaacaacagacactggagtctacctgagggtggagggtgagaggagaaagagaagcagaaaagataactgttgggtactaggcttaatacctgggtgatgaaataatctgtacacaaacccctataacgtgagtttaccaatgtaacaaaccttcacatgtgcataggtttgttacctgtgtaacaaacccccaaacctaaaataaaagttaggaaaacctaatttcaaaaggatatatgctgcgtgatcccatttatagaacatttgtgaaataacattcttagggggatgagggacaagttagtgtttgccaggggttagggatgcaggagggggtgaacgtggccccagagaggtagcatgaggggtcttgtcccattggygccatcttgattgtgtgtgggtactatttcggttgtggttgagaaactgcacagatgcacatgcgcacacacacgcacacgaatgcacttaaagctagagaaatctgaataagctttgtcggctgtaccaatgccaatttcccggttttgattttgtcctctggttttggggcatggtggccttaggggaggctgggtgaagggtgcatgggacctccctgtacatttctttgcaacttcctatgaatctgtaattattccgaaataaaaagcttaaaatatgaccattgagttattaatggtaaggagtcagcataagaagaagacatggaaattyggtgtgcccagtrcacatgttgcccaggtggggctcctgccaacggagtgcccagtggtgggaatgtgaggttttcaggacccagcatgctctgcagagcgggagagaggacgagcctgccgccttgctaaggagggctagtgtagatttaccctctttccagcagagatgaagatcttggtcaacggcatctctcacgggtaygragataagcattaagatttatgagtaacttgagggagagtgggagaatgttgctttttttcccccagacctggcctctaaggagacttggctgtctagttataaagggtacataaaatgctctggaagatgagattacattaactcctggaaataccaaaagtactttattttaatgtacttkttcttgtagttatgagcaatttggataattacagttggcagggatgcgccgacgcacatacgctggagttacatattatcccagccttgatcctgggaatatcacagcccttcacctgtgacactggagtttaaactggagctaaggtgtagccagtgtcttctaaacagaatgggtattggatacaagcccgctgttaagtcattgctgtcacctaggtaaacaygcctttgtaacacagttatgagaaatggacaccaaagagaaataaatactatactgctatgggatattcctgaatgacccagcttgtggttagacgcattgctccaccagacaagtttacagtgaactcggggcaggtgtcttgcagttatatgggaagacaaggaagctctcaataggaaatgcttctgcaaacacactgctcgctcaccataaagaaaggctgcttctaacattgcagtagtaccctggagtaaagcccgtcctttccccattttctcaggggaaataagtactaaggaagtgccacatgcgatattatcatcaagcrccacaactctcaaagggctgcttctcttaaaaagccccgagggactctgttgcatagtgagtttaaagatgcagaaaatcaaaacttcatctgcacttgagtaataacactccgttgctggattactaaaatatgattctaggatggagattaaagggcgacacctcagctcccagccaagccctgaggttgtaattctatggtgggagaggccccttaggctttcatattaacagtgtggttagggaggttgccaagggtggctttgctggggatgtgaaggtgtcactgtcaccttgctgggcatagacaaggcacttggaatggacagctccagggctttcactcctatctccctaaaggaatctaagggttgggcagacacctagcgtgccaggtgcaggcaagtcacctgggtgagatgggcagtatattccaaagtgttaggcctcttaggctcttatttctgagtaataagcacttttttgagtgtgttggcttcacatttgattgaaacatcaaagcatcacagtttctgttatgttcaaattgggtcaaacaagtgccatccagacagggtatggactttcatacctttcatcatcattgctctacacgttggatgctggttcatgtttaatgaaatgtattaaagttgaaatcccaggatgccctagttttactaaaacagtgaatcttgtacattaatctgtgcaaactagctccatggcccggagccctggcagctcagctgtccctcttccatcctccacactgccaaggggcagtgagaggctccagcataccttccttccaagagcactgtcaccagttccccctccccacccgtcttccccactgcctggctccccttccacctgagcctgccacgtgctcctgagcagtttccccttccgttagcccagagccttccccatgccctcgagctgtttcccaggaccctgccagccagcgcaaagcaggaaggtgcctttcgggcagtttgctgtttgtggacgtgcttgccttctggtccattacccagtggcgctcgttcatgttagatgggaaatcctctgagggctgaaagacactttcggctttgatcttcaggtcagcaggaccagtcagcatcaacatctactacatggaaagccctaggtttatgcgtcctgcagccttgaaacttcctgccctgtgactaccgtctccgcatttctcccactccctgcgccgggagcctcctttctactctgtccgtgtgtttgagattgtttgttagcgtgagatcacacagcatctctgtgtctggcttatttcacttcargtccctcaggttcatccacatcgttgcaaatggcaggatttccttcttttaaaaggctgcatagtattgaattgtgtgtatatacaattttctttatccattcattcctcattggacacttaggttgcttctgtatcctggttcttttgaataatgctgttgtgaaccctgttgaggggcaggtaggaaaaataagcctcaaggtctaatgcacagcatgaggactgaagctaatatggtagttactcttgtattatataccggaaattggctaaaagagtagattttgggtgttttcaccgaaaaaaaatgaggtaactgtgtgaaatgatggatatgtgaatttgcttgactgtggtgatcatttctctatgtatttcactacgttatatgtatatcaaaatataatgttttgtaccttatatgtatataataattttttttaagaaaagagagccccatggcaggtggtgtgtggacctgaaggtaaatactgggtcttgccttcgagagacttgcaggccagggagagggacagcacatgcatagacggtcttgctggatcggagacttttgcaagtgacttcagccctcatctcctactgtgaaccgacagtaacgatagtgcccacttcctagggttgctatgggcactggtgcccatgagccaatagctgcaaaggattcaggatggctcctggcacatggttggcactgtgtgtgtgtttgctagaggtagggacaaagctgcctgagggaacagggargctgctcagctctggccgcgctgcctggaagacacccttcagaaggtgctgggcctgtccagccttgatgttcacttgggtagacaggagtttgatgaaatcgacgtgcgtgattgcctggctttggtgttcagcctgcaccgtgagccttaaatgcttctcattttgcagccagtgttgccactctgttgttgggtgtgtttctcttgccaagctggacctgtaggatggttggttcagacaacccgcggaaaggaagttggaaagagaagagaattagcaaagaggaaaggttagaaagagagagttgaagttatatagctgggaaaagaggagcaggaatagcatagcaactaagaggaagaaaaagtagaatactcccaggctgggggcccacacctgtaatcccagtactttgggaggccgaggcaagatgatcactcgaggtgaggagttcaagatcagcctggccaacatagtgagatcttgtctctactaaaaattgaaaaattaggccaggcgctttggctcatgcctgtaatcccagcactttgggagcccgaggtgggcggatcacgaggtcaggagatcgagaccatcctggctaacacggtgaaaccccatctctactaaaaatacacaaaattagccggccgtggtggcaggcacctgtggtcccagctactcgggaggctgaggcgggagaatggcgtgagccccggaggcagakctggcagtgagccgagattgcaccactgcactctagccttggcgacagagtgagactccgtctcaaaaataaatagataaataaataaaataaaaaattagctgggcgtggtggcacgagcttgtaattccagctacttgggaggctgaggtgggaggaccgcttgagcccgggagtttggggttcagtgagcaatgatagtaccactgcactccagcctgggtgacagaatatgacccagtctcttaaagaaaatataaaagtggaatactgattgggagggaggaggctgtgcccaaggatgaagtttcctatggccggccttgttgtgtgcaaagggccaggcttgggaccctgttcaggacaattggcaaaaactgtgctgaccccatagtcaggaaagcagctatggtccctgccctcactgcgaccagggagggagctgcttccgtgggctgctgctcctgcgggggctttattgagacccacttcacgtaccatacaattcacccagttaaagtatacaattcagtagctttttaatatatttgagtatctgggagagttttgcatccattgccacaatcaactttagaacattttaaattaactgattaatttttaagagataaggtctcactctattgctcaggctggagtgcaggggcatgatcatcactcattggaacctggaacccctgggttcaagtgatcctctcacctcagcctcccaggtatagctggaagcacaagctcatgccatcatgcccagctaatttttgtttttaaaattttggtagagactgggtctcactgtgttgcccaggctggtctcaaacttctgccctcaagtgatcatcctgcctcggcctcccaaagtgctgggattacaggtgtgagcaactgcacctggcctagcacatttttagcagaaaaatgagccccatattccttagctgtcacctcctaatcctccacagatttacctagtctgcgcatttcacaaaaatggatcatgtgtaatacatggtcctttgtaactggtttccttcacatagcatgtttgcaggctcattcatattgtagcctgtatcagtacttgatttttgttcattgttaaatggtatcccattgtatggatgtaccrcatcttgtttatccatttgtcattgatggacatttgggctgtttctacttttggctactatgaataatgctgctgtgaacatttgtgtacaagttagtgtatagacgtgtgttttcatttctcttgtgtatgtccctaggaggagacttgctggagcacacgatacccctgaggtttaactggagagctgtttgcattcccaccagcagttctccgagggttccactttctccacatcctccaatgcttacctgtctgtttcagactctagccatctatcgggtgtgaagtcacatcttattgtggtttggatttgcattttccagatggctactgatgttaagtacatgatgtttgatgtgtttattggccacttatgtatcatctttggggaattgtctagtcaaatctttcacccatttttaaattcagccttttattatttagttgcagtttttagtagatacaagttccagtcagataataggacttgcaaaaacttttycccattctgcaggttgtctctttgcttccttgattatgccctttgaagcacagactttttaaattattatttttaattgacaaaaaattgtgtatatttwtggtgtaaaacatgatgttttgaaatatatatacattgtggagtaatgaatagttaataacacacatagttagtagttaatagcatataatagcataataataaataatgacaatgtattgtatacttgctgagagagtagtttgttttttttttgtttgttcgttttttttgagacacagtctccctctgttgcccaggctggagtgcagtggcgccatctgggctcactgcaagctccgcctcccgggttcactcctttctcctgcctcagcctcccaagtagctgggaccacaggtgcccaccaccacgcccggcttattttttgtatttttagtagagatggggtttcaccgtattagccaggatggtctcaatctcgtgatctgtccgcctcagcctcccaaagtgttgggattacaggcgtgagccacggcacccggctgagagtagattttaagtgttcttagcacaaaaaaattaagtccatgaagtatgcaggagtaacataggaactgagaggaagaaaaaatggaatactgcccggcgcatgttaattagcttgatttagccattccactgtgatccattttgtaataatttttcactccagagtgaagagaagtgtggtaggggtactctactgtcaaactgctctttaaataaataaaagtgagggttatcacaagaaattcatggtgagcaggcctcagaccagtcatcttcggctctgcggggctggacttctctggctgtttagagacctcagtgttgcttttcagtgaggtcttttggggagaatggccagcaggcattcatgctttttattctttcaattaaagataaaaataaaaaaatatgggcccggcgcagtggctcacacctgtaatcccagcactttgggaggtcaaggtgggtggattgcctgaggccagcagttcgaaaccagcccagccaacatggtgaaaacccgtctttactaaaaatgcaaaaatcacccacttgtggtaatgtccgcctctaatcccagctacttgggaggctgaggcacaagaatyacttgaagccaggaggcggaggttgcagtgagccgagatcacaccactgcactccaacctgggcaacagagtgagactctgtctcaaaaaaaaaaaaaaaaaaagaataaaatagattaaaaaaatgtaattgacacataacaattatacacatttgtggagcacagagtgatattgcctatgtatacggtttgtaatgatcaaattgtgataatcagcatgtctatcacctcaaatacttatttctttttattgggagcattcaaaatcctctcttctagctattggaaaatacacactaaattactgttaactatagtccccctgcagtgctgcggaatgccacaacttatccctcctctccagctgtagtttagtatccagtaacatactcttttcatttcctttctttgggcagaaggctagatgttgcctgtttttgttttatttttctgcttcacatatagcgcacgaaagcagagtgtattcaaaaaaggaaatgtgtttgaaaaaaaaaaaaggaaacgaatttacataggacctgtaagcataagacaaaaaatggaatctggtcattgacaaccttaaatataaagatgccaattttagactgcgacaatggtccagaacatgacagatctttgtgatgactttgccttgcccggcacactcacaggcagctgcctttgctgaaatgaggccttgtgtctgctaggagagtagcactcagattttccacccattgctgaatgagtttcctgaggcttctataacagattaccatacaccaggtggcttaaaccaacagaagtgtattctcttacagttctgaggcttcaaggctgagaccagcgtgtgggcagggccgtgctcctgtggaaagctctagagaaaaatccttctttgcctcttcctgcgtctgtggtggccgccagtccttacgtcccctgtcttgcagccacgttgatctgatttctgtctctgtcttcacatggctgtcttctctgtcatgagtctctgtgtctctgttttctctgcttataaggataccagtcattgggttagggcccgccatactccagtataaccttatcttaactaactatatctgcaaggatcgtatttccaaataaagtgacattcagaggttccagatggacatgaattttgggggacactattcattcaacacagtgtaatcgccaaagtcacgtactggcactgtcctactggcactggagggtttttgtttgcttgtttattttaagcattccattttgctcatgaataatgagttattaacagcaggaggttcagaaggttgtgtggctctttggaaatatatgacaatgctatcttctagatcccctcacctgggtcaggcagtgaggtgttgcccataggagcctctataggtgcaggttccccttggtaccatgctttgcacatcgtgtgagctcagagtttgtggacagatagaaactcaggaaacacaaaatatcgatccatatggtatttagctgaatctgtgaagactgtcattgattgccaagaattatgaggatattgctaagtcagtggcagtcatttacactccacaaaaagccattttcacatctcgacacactgaacatgtatttttagagaatgactaaatgcagttccatcccctattaggaattccctgctcgcagcattctccaggaaaatgttgtcaaggagattaactgtccacatgggtgagtccagcatttttctgaggtagcacaaacacacagagcccattacagttccaggacttgcccaacaatgtgtaattgcagcggggagagaatctcatacggggtggagcccccgaggcccccgagccacacacagctttggaatgaggtgggagagggtatgggcagcggtcctagacatccagacactgtggagggtgctgggtatgcacggggtccagcctgtctgctgaggagcgggcagggcatggtggggaaggtggggtgagtggctgggacttttgtttgcatttcattgcagactcatcatttgccccaaatataattttggctttgaatcatgtagcgaagcagccagatgaagggaggcccggcacagccaaagctctgaagcctgggaagtattgccgtcccactctgagaacatagttcagtgaatcattttcctggcttcctttcaaagtctgaggaaatgaagtccttaggtttgaaacagtgattcccaggagcaggtaagtgctgaaagcctcatcaggtggcacgtttactaaagccacttgtttcttttgaaacrggtttaatatagaccatcttaaaatgtcatgacctcatgggacaatgcagggggacagaaataagttgtcacctctgagtttgggactgaagatcccagagccacagtgagggaagacggaagggggccgtggcgaactgggctgttaagagatcatgtggccagtgcagggacacaggacccccccggagagaaagggtctgggtctcctcctgagagcctgttcaggaatctccaaattcttgaacttgtggcgtggttttctttggaaaggaaggaaggtgtaaagaagcccaagtcagtttctcacttgagaaatgctgttgcaaaggggcagtgtggtgggaattttaacctttgccactccctctagcagaactgtgtggttttggacaggctggccgccagtttcagggcacaatagagggacacttccacccctttcagtgacttcccaaggtggctctgcagagcaccccttaggagagtggagcctggcctctgaggccattctgaatgaggggaaggtggggatgacccaggaaggccagcgctgcatggctgcaccccctctcctgcatttacccccaggtgcctgtgctggcagcggcacatcaccaggcctcctcctctccgtggctccattcacagctcctgctggctgaggccttggacctggatgcccaccgcacttctccccgcctgaaccacctccatctccctccagatggtgaccgaggcctcctagcttaccctaaccacctcctgcctccaccccggcccctagcacacacctgagcatcctccacccaatggccaaagtgattccttacaatagaaagcagactggggccctcctcttcttggaagcctcactgtcttcccttccctgggagtgagatccaaagtctttgcttgacccacagggtcctgtacctggtggcccactgtgtccctcccccgtaccctcactctcygcctcccatcccactacgccttggcctcttgggactccagagcgagccgtgccttagagccctgggctgctgccccttcccccagctctctcctggctcctgcctagttcaggcacctttcccagtgtcacactcccagggagatcctccctaaatgcctcatctctgtccctactctgtttatcttactacagtctgacccacgtatggatttgggcatttagatgtttctctacccaccctcctccgcattagaatgttaactcttgggagcaagagctttgttttctgtgtggcggcatgcttggttcctgctcaagaaaaaaaaatttttttgaaagaacaaataacatcaacactcaatactcatttattcacatatttaagacatttttcctgggtatcccattttaattcatccttaaaatggaactgatcttgcctccttagcctaagttcaggggaaatggatgcaaagctctgaaagtcactgatctgggtgctgtgaggtgacatcatcacaggtgacatcacyagccagccatggagaggtttgaacgaaccttccccctttctcccagacagatgtgaccaggctttatgaaaatttgtctgtaaagaggcacttttcaccacattattttaatacacttgtgttattaccagaaaaatgggaaagaaggaaataaaatttgcatcgactttccgcctccttactccatgttggttcttgcaaacagactggagttgtgtgtctgttaccccctcctttctcgcacatgttccagcgttatgcatgatgtggagcaaagctttattaataaggttgccaggaatcaccagccatagaaatgcctacctttttgagtgaacaattccatttctataaatctatcctgggaagataatctttgatgcagtcaaagatcacagtgcccgaggatagtcagtttttacaacagcacatgtaaaacacagcatgagtgctgccaaatccatataataattagatatcatggttcacttactggaatactgtgtatttattaaattatattttaagatactttctggttacatggaaatgcttatgactggataaagcaatacaaatgatatcaaatacgggatgttaaatttccctctaagccctgctttagctgcatcccgtatgttttggtgtgttggatttttgtttgcgttcatctcaaagtatttcctaatttccctgtgatttcccctgtgatccattggttatttaagagtggattgtttaatgtccacgtatgtatgtctttctcaaatttgcttcagttattgatttcatttctaagttcattccaaaagcctacttartatggtatcgatcctttaaacttactgagttttgttctatggcttagcttatggtctgtamtacaggacacgccacgtgcacttaagaagaaagtttattctactgttgctgggcagagtattctacagttgtctgtcaggtctagttcatttataatatttttcaagtcttctatttccttgttaatttctgctagttctatttattgttgaaagtggggcactggattctctgttattgttaaattgtctatttcatccttcagttctgtcattttctgcttcatttgttttgggaacttacagttagcttyatttttgcttataattgttatggccttctgatggattgacctttttttcatyataaaatgtctttcttgatttgtactatcatttttttgttttaaagtctattttttgttctaatactaacatagccaatycagctcttttggttactttttgcacagtgtaacttttttcatccttttactttcaacctatttgtattttttaatctaaagtgtgtctcttacagatcacatatagatggattgtgctttttaaaaaatctattctgtcagttctgcctcttaattggagaacttgaccatttacatttaatgtacttactgagttggtaggatttaagtctgccatattgctatttgcagtctttatgtcttaggtatttttatttgtctgttcctccattactgccgccttttttgtcaaatagatatttgcttgtgtgccatttttatctccttgtcatttattttatcactttgggggttatttycttagtaatcaccttgtgggttttaattagcrtctaaatttccagcaatgtaggtcagattaataccaccttaattacagtgccatgaaaactttgttcatatgtagccccaccatcctccctccactgkgctggtgttgtcaagtcctgtcaattacatcttgtataccttgtatgcccatcaacatagatttgtaaatgttgctttatgtcttttaaatcaaggggaaaaaagagttacaaagaaaaactacctttgcattttatatttacttagtagatacttttactggtgctctttatttcttctgatctattcaagttacagtctagtgtgctttcatttcagcctgaaggactctgtttattgtttcttgtaggagaggggtctgctagtggtgacttctctgtttttgtttatctgggaatgtccaatttcacctatgtattttgtgtagtttttgctgaatatagaattagcgactggcagtctttatttcagcactttgaagatgtcacctgactcccttttgtccttcacgtccttcatgatttctgatcagaagtcagctgttaaacttactgaagatcccttgtatgacttgcatcacttttttctttgtttcttccagattctttctgttcattaccgaatgtagggctttgggcttttgacagtttgattatgatgtgtataagtttagatctcttttgagtttatctaactaggaattgtttatttagcttcttacatgtgcagatagatgattttcatcaagtttgggaagttttcagccattatcattatcatcattattattattacttctttttcttgagacagagtcttgttctgttgcccaggctggagtacagtggcacgatctaggcccactgcagcctctgcctcctgggttcaaatgattctcgtgcttcagcctcccatgtagctgagattacaggtgtgcaccaccacatctggctaatttttatatttttggcagagatggggttttaccatgttggccaggctggtcgtaaactcctgacctcaggtgattccactttttgagacaaagtctggctctgttgcctaggctggagtgcggtggtgcaatatcggctcactgcaacctccacctcttgggtgcaagccatcttcccacctcagcctctcaagtagctgggactacaggtgcaccttcgcacctggctgatgtttgtatttttattttgtagagatgggattttgccatgttgctcaggttggtctcaaactcatgagctcaagcgatccacccacctaggcctcccaaagtgctgggattacaggcatgagccaccgtacccaacccagtcattattttttcaactgtactttcttctttttgtctctcttttttctttctgggactcccattattcacacatctgtttgcttgatgatgtcctacgggactctgagactgttgctatttcttcattttttttctgtctgtttatcatactgagcaatctcaattgacctattctcaagtttgctgattgttttttctgtttgctcagaaatctgctgttgagatcttcaaatttttatttcatttattgtacttttcaactccagaatttgtatttggttcttttttgcaatatctctttattgatattctctatttcatgagacattattatcatacttttctgtagacatggttttctttaattttttggaaatatttattttttctagtaactccaacatctgagcttgcttggggacaatttttcctgtgtgcatggactttcttttcttatttgttggcatgtctcataatttttttgttgttgaaaatggcatttaaaataaaacaatgtggaaactttggaaattgaattctttttttctccccagggtttgttgttgctgtttgttgctattgttgtttatttatygacttttatgaaccagytctgtaaggtctgtattctttgtcctgtggtagccactgaagactgtgcttgattatcttagtggtcaaataatgatggacagagtctcctaatctttgctgatgttatgtgtgcatgttttgggcacaccttcaactctgagccaggtggttacctctctgtcttagccttcattcctgcttgtgcagaacctcatgtctgccaaagctgagggctcatggccctctcatgtcccttctgagtgtatgcatagctctgagcatgtttatattcctacacatgggtgtggtcttagagattcccaggaatatgctggagtttcaaagccctctgttaatatctcattcctcaggctttctttttaagattttgatctgcttgttgtttgccccacctcatagccaccatctcagatgttctaaacaactgcctctaatttgacaaatgtcaagtgaaaacgcttttcctaatgggtgagttccaagtcaggttaaataaacacagacttgtgaatgggattttccagggaaaagcagcctggtcaactaatgatagttctctggtatggrctttgaaggagctccaacctcgtattttgcccttcggtagctggtttcttgttttgttttgttttgtttttcccagagtgaaggtgtcgttctatcacctgggctggagtgcagtggtgctcactgcaacctcagactcctgggcttaagcgaacctcctgccttagccttccaaagcactgggattacaggcatgaaccacagcacctggcctagtggctggttttaaaggctaccttggagctgcagtgaggagagtaggaaatacggaaacrtaaaacgctacaaagctcactgttcttactgagtttcagccatttttcttgaataaatgtttttggattgttgctaatatttgattaattttcagagacctgaaaaaagttgattttgacggtattttgccattgttctytctcactgcttttatgaaggagataatttttggaggtccttcactccaccatcttcactgacttcactgacataggatattaaatgtgtttcgttaaaatgcaaaaaaaaaaaccacamaaaaagtgagaatgttaaaaatgtaaggaagaggaatgagttgagaaatgttttttcttttttctattttttttttttttgagacagggtcttgctcccttgtccaggctggagtgcagtggtgtgatcatggctctctgtagcctcaaccacctgggctcaagcaacccttctgcttccacatccctagaagctgggaccacaagtgtacaccatcacacccagcatttctttgtatttttttaatagaggtctcactgtgttgtccagtctagtctggaactcctgggctcaagtaatcctcctgccatggcctctgaaagtggtgggattacaggcatgagccaccttgccaggctgagaaatgtttttttcaattactatgtttagtgaaatatttttttttctctttaatagtaggaagtgtaatctataaatgttatattcatatacaagtaagtttgccttgtagcaaatttttagtaagtggtgggggttggtaaactacagcccccatttttgtaaatccagtcttaactggcatgcaggcatgctgttctgctaatgcactgcccgtggctgcatctgtgctgtagttgcagaggtgcataggtgcaaaagaacgcacatgacctgcagagcctaatatgtttactctctggctccttacagaaatagtttgccaacccctcgtgcataggaaagtaagtagctattttattttaaatatagtaatgaattgggaaatgtgttaactttaagtttgcttattactacatggttattttaaaagctctaatgtcaagaatgaatttatgagaacattttggttgtgggcaatgttatgctatgaaaattttttrcttgccttatagaaattaaagatcaacaatagttgagttaattcaagtaatgcttttggtgctgtgaataaattgtaccgtaacttccttggaagacttctatttagaaacaatttggtccagtcacttaaatcttagcatttgaaatacaacatagtgggtatctgactcaaaagcaggaggaatgcctgtgtaagggcactgaacccacagaagggcacctgggggacgtcctcaagttttcagttgttatttgaacttgtgcaggccactttgtttttctggtctcaattttatcctctattaaatgggtgtaatataactcttctgaaaacattgtatgaattaaatgaggttgtgtgtgaatattcctcatgatctataagarttgaacaattgtctgtactattactatcatcgatactgttgytaatgtgtaatcaagatgcagaagaggtttttttctgttgctaatgccattagccrtaccattgaagccagattctttaaaatattaaaccctccattaatttaaaaacactgtgtgctttccaagcccaaaccccartttctgtttcactcttgagrtttttttcaaaaacaataaaagtttaatttaaaaaatgttgcttctttgaatagttaatttctgaaagtttgtacattgcagaagcatcaatagttcttatttttttcatgtccttgaaaaaaaaagagttgttatttagattaaatgactcacaatttagtgaaggtagaatttacaatcctagatggaaagtctaagaaaaaatattacataggaatctagcttgtttttattttaggttgaaattagcaattctatttggctaaaactttgacttactgcagttaaacattgattcaacggtgaattgatgatatactrctttgyataaggtataaaaggtgaggggaaatagttatctctaaggtaattttctctaataattattttctaagcagcaggttctgtatgtgtgtgagagagagaggggtacagagggtatgtgactaggtttgtccttggagtgagacaggtcagggttttgtttccactctgcttagaagctcattgtgtcaatttgggtgcgacacttaggccttgtgctcctctgtaaactgggagtattacttgcctcatgtagccttattgtgcgataggcaaaggtgtgtcaggaccctggggcctgcctgccactctgatcattaggccagcagaaatgggaggrcaaagcataggtcagatcaataaaattcacacctgtcccaaagttacatatccagtctagaatgttaatgaaatgctgaaaaaacataggttattatttaccattatttgtgttttcagaagtactaccgaacaacttggcatcctacaacatatatttgtaaataacacacacagccagccctccgtatccatgggttctgcatccctggattcagatctaaaagtattaaagacaaaaatcactgggtctatactgaacacatacagacctttttttctkgtcgtcattctctaaacaatacaatataataactatttacgtggcatttccattgtattaggtattataagcatctagagatgattgaaagtctgtgggaggrtgtgtatagattatatgcaaacactatgccattttagatcagaaacttccgcatctgtgaattttggtatgggggactcctagaaccagtttcccacaggattccrtactggagggttgactgaattttcataattctaaaaggtacacagtatttcctgtagatcatttggaccctagagtaatgtggaagaaaacagccatcatttgcaggattctttgccattcagagctgttaccaatttggcatagctgtagttttgtgtcccatgtttgtcccaacartattatgtttcctacgccatgaaatattctgcaaaaatatgatttctaaagactacaatgtttctgctctaaagagtgtgaccattgacttcattatttgttttgacctgggcatagatccttgtagacaaatttgtgcacttttccagtgatttcaagcaaaaccccttccaaaattggatgccacagttgaaatgctcacccagagaggcccctccccaactctcactgacactgggccacccccttaaatttgatctttcctttaaggcaggcaaaaatgacatctttttgtttccagtttttatctattcaatgttgtttctgtaaggtcactagccatatgctttttttgtttgtttttttttttgttttttttgagacagggtcttactctgtcacccaggctggagtgcagtggtgagaacacagctctcattgcagcctcgatctcccgggctgcagtgatcctcccacctcagcttcctgagtagctgggaccacaggctcatgccatgacacccaggtaactttttttgtaggggtctagctatgtagcccaggctggtcttgaactcctgggctcaaaggatccacgtgtcttagcttccaagcacgctgggattgtaggcatgagccatttgtgcccagtctgctgcttctttaaattgcctgtttctttgccagtttttctaaaaattaaggttttttaaattaaaaagtttataggatatattgatatgactgtaatgtatgtttatttttatctgtcaagtatttttcccactttatcattactttcaattttgtttagagtgtttttgacacataaagtggaaaacttgcataccttccaatatatcaaccttttcccttttaagtactttttaacttaaaaagttcttttgaaccctgaaatatgcaaatatttgcctacatttatttctgtttgccttatggttttatgttttaatttatcttgaacttttaaatatgtattctgtttgggtacaggtgttgtttttccccttcatataataaattttcccaagcagcatttttgaattttctcttctttaccacataaaattcgacctttattgtactctttttaaaacattttttcccagaccactgctattatcttgcacactatgccgaacatttataaacatttcaacacatagtggtgaaaacccacctctgaaattgttttcttgtgtgttttcacctatttatttttccatgtaagttttagaattattgtcaggttctctcctcgactttggagttttagttgggattgctcttctgtcaggagaatcaacatcagtatggtatactgtgtttctgtttaagacacggtatgtctttgtattagcccagttttcctttttaagtcattcagaaagtactgccattttctccatagacattctgtccattaattttgaaatttacttctttaacttttgtaatttttgtgttatggtgaatggacctaccttccgtggacaaaccccttttcccagatttttgagctagttattgctgatgcagattgttcatgtgaagctggcttatttattgaaggtttaaaattatgatcctgtagttctatcatatttttatttatctatatgtatttctatttctatctataatacaatgtattccttcctttagtgctgtttttaatttttaaatgtttaaaaatttgtataaattgaaggggtacaagcgtattttgcctgggggtgaagcctgggcttttaatgtatctaccacatgtatataatgcacattaagtaacttctcatccctcacctccttccgccctcccccctttttaagtctccaatattatcattttacactctatatccttgtgttcatgttatttagctcccactgataagtgagaatatgtggtatctgactttctgtttcttagttgtttcacttaagataacaacctccagttccatttatgtcactgcaaaagacatgatttcattctttttatggctgaatagtattccagtgtatatatgccacattttctttatccagttatcctttgatggacacttaggttgattccacatctttgctactatgaatagtgcagtgataacaatacaggtgcaggtgtgtctttttgatataatgattttttttttcatttgggtacataccctatcgtgggattgctgggtcaaatggcagttccatttctagttctttgagaaatctccatattgttttccatagatttgtactaatttacatttccaccaccagtgtttaagcgttcccttttctccgcagtctcaccagcacctgttatttgttaactttttaataattgccattctggttggtgtaaggaggtatcgcattggggtttcaatttgcatctctttgatgattagtgacgttgagcatttttcacttgcttgttggccatttatatgtctagttttgaaaaatgtctattcatgttctttgcccactttttaatggagttacttggtttttgtaaatttgtttgagttccttgtaaattctggatgttaatcccctgtcagcggcatagtttgcaaatgtcttctcttattctgcaggctgtctattcactctgttgattatttcttttgctgtgcagaagcttttttagtttaagtcccatttctctatttttgttttcgttgcttgtgcttttgaggtcttcgtcatgaattctttrcctagaccaacgtccagcagtcttccctcgggtttcttctaatacttttatagtttcaggtcttagagttaagtctttaatctatcttgatttgtgtatagagtgagagataggggtcccagatcattcttctgcatgtagcaatccartttccccagcaccatttattgaaaagggtgtcctttttcctggtgttacgtttttgtcgactttgtgagatcagttgaatgtatcagtgttctcttccattccattggtctgtgtgtctatttttgtaccaatattgtgctgttttgattactaaaggcttcacatataatttgaagtcagataatgtgatgcccyggctttgttctttttgcttaggactgttttggctattcaggctcacttttgggttcatatgaattttaggatggtttttttctaattttgtgaaaagtgatattagtattttgatagggattgctttgaatctgtagatggctttgggcagtatggtcattgtaatgatactaattattctggtccacgaacatggaacatggaatgttttccatgtttgtgtcatctacagtttattttattaatgttttgtagttttctaaaaatacttgtttaatatgaacttactacctttctttaacctttttttgtatatttggcttataatatatttttcgtattaaaaacttattctagatttaacttgcattaggagtatctcctataaagagcaaatattttgacttttacatagtttgcataaaaatcaagttaaattgaaaattcaagtttccttagagatcactttagtgggatttaagttcaaataaataatagtatgagatatttatgtgtttctaggtttttttaatatattagtgaatttatatcccagatgtttcaaacaatttccatgcaaattgctttttttaaaaataattttttaaaagctagtaaaatttagcagtggggggattgtatagtgacagcaatgttaataagttctgataacccactaccatctgaccagccaaaaattaactagaatactaaaactaatttctagtgaaaaccaaaaatgaatacaactttgtatattctctttaaaggaatgtacattgcaaacagaattttatcatcatcatattattacatgtaatctttcaaattctttaaacygtttcatcttcacaagagccccgtgttgtattgttcccattttagagacaagaaatctgaccccaggaaaggttaaataatgtgtagaggtggatatccatgtattgagctgaactgacaattgaaccttgttatttcttttgaaccatggtgrtgatcagtgtcctcccagctataatcagagtagactagagatttgggggaaaggaaagaataatttgtgygcatttgagcagttgttttctgcacttctgtaaattattttatcaatcttatttagaccctttcataggattaaatatgctaagtgaagttgtatttccccatattgctaatatttgcatttcagttgtctttatactatccaaattggaaattgatttattaaactgatctaatttaaataagaacctcaccttctagttggatacaaaccacattgttagagagagaggctgggtgcggtggctcacgcctgcaatcccagcactttgggaggctgaggtgggaggatcacccaaagttaggagtttgagaccagcctgaccaacatggtgaaaccctgtctctaccaaaaatacaaaaattagccaggcatggtggcgggcgcctgtaatcccagctatttgggaggctgaggcaggagaactgcttgaacctgggaggcagaggttgcagtgagccaagattgcaccattgtactccagcctgggtgacagagcgagactctgtctcaagaaaaaaacaaaaacaaaacaaaaccataaaacagagagagagaaagacagagaaagttgcattatagatagtatattatatagactagctaaattgtaaaattcaggtaggatttttttttcctacacattaacaaattttaggttagaggcccacaccgtttatagccaagagtgtaagatacaacagaattttttttgtttgttttacaattggatttttaagatccatttttatgccagatttttctttgtaagcctcttctttccctaacaaggagaataatacattaaaagtggagatcttagatcttttcactttgcagataggtcataccttaaaaaataatgtgactaagacaaaaaaattatgttttcttcttatttgttaattctttacaatatcataccgtctcagaattgaatagcattatcaccgacattgcaaggttagggaaagaagtacacaaatctttcgcatggtggattgttactttttaargaggtatgaawggaatggcagtacttgtgaaaatattttttaaaaagctctctaaaaattgcacagaattctgtatttcatatttttactgtrcccatcacttaacacaaacttgaatttatatcatatgtagaaccaattttattatttagggaccgtcagaaaggaaaaagtttttcatttggttttccatatttttccacttttaattttaaaarctgaactagaaaagcagctggrtgtggtggcttacatctgtaatcccagcactttgggaggccaaggtgggaagatagcttgaggccagaagtttgagaccagcctggtcaacaaagtgagacccctcatcaaaaaaaaacaaagcaaaayaaaacaaaacccagagaagcaacataagatctttcatttcacttataataatttttattgttctcgaagttctgtttaccaacttaaaatattttaaattctaagtttcaaatattattgatagtaaataagcaagtatatctcactttaaaaaatattcttaattttcctataagtcaattattactggcattctagatcttctaccstggaaatctttgatttaaaaatatytaagtaatttcttcttttcttaaaactttccaccctacacaattgtcagattaacccttagattattagcatagagttaggcaaaatttccttacatttgcaagagttggaaccaaaataagtcaattaaaacgcaaagatactctatataaagcaaaaatgtgttattctaagcaggcgagctagttgcttaataaagttagcttttctcctaaaatggctaacaaatagaaacagtcttttaacatttccaacattttattttcgtggaaaaagcagtttttcacatgtgcagaaaatggaatgattaaataagcttaacaaatttttctgcagaattcgtttttgggtttggttttagtctgtgtttctgtagtacccggtagacataatcttgtgtgatgggtaacagttgcgagaggtgaactcttaagtttctttgctctttaggattctgcaacttgcagaacatctgctaaaaagtagcaaagctgatgcatttaagttttccatcttctgtttgcctcgtctttaccggcatggaaagtaaggaagagctggtgggaagggctgagggaattgaggggccggaagaagggcgtgtccacactgagatgccgctggggtgtatgggtactggagctccggtgatgggaggcactgtgtggctgcagagcagtttggccccaggggggcccggagcccgtggagtccagtgctgtctgaggtgtacaacaagctatgcatggagattttcataactgtctttttcatacgtctcctttttttcagctccgagaacagagtttattgaggatcactggttggcatctcgacacccccatgaaatagactgcccatgcactgtatagatgctatttytaaagtgtcgggaatagactcttgaggcagatagggagctaccgttcatcctttacacagtgagaagtctgtgcacatataaaatgagaaaacaggcttagagtgtgtgagcagcctgcccgtggtcacatcccaagaagcccatgcatgttctgaaactggaagtcacgtgaaacattttgagcactgatgatctccctttatcagtaatttcaactaactgggttgtttaagtgagtaggcatttatttgtggttttgtttttcttatgatggagaatagtagtcgggtttcatggagcgtaacttctgagtgcctggtggtgtgatgtcgacctggtagtaggggatggagggagatccatctaatcaagttgattttaacaaccagcaggacattctgttgggcatctttttccttaaaaggacattctgattctttgagagaaccttcctgtgtatacattcttcataagccaggtggatttttcgtatttataaggtacacaccatacacaaaaatgcatgtgtttgtgcgttttctcactggcttttcatcattggtgccaggctgtgacaagctttgcagtaccagactatgtggctggctctgcctttttcttctgtctgtcctcagatttggaaataaaaggtgtttgcactttttatacgccaaatgacttcccaaatgagacagaacggttccaagggcaatgcacggtagcttaagttaacttaaagaaggcttattcacttgtctttagaagtagctgactcccacctgcccagcttcccagctttaggactgtggggactccagggatcacaatgaagtgggcatattccagagcgattttgaagaaacagaggaagatgaggttcctgtcatcacggatggtactgaggaaaakggcaaatgggatttggattccagtcccaatcacgttggtctgcagacatcattggtggaaccaggcagaggggcatctttgccatttctggtgastttcattccttgtgtacacgcagattttgtctggcatcattttccttctgcctgaaggacttcgttgaacatttgccatggtacaggtctgcccatgatgaatgtctttgtttaagtctgagcaagtctttatttttcctacgtttttaaaatacatttgcaccagtgcagagttctaggcgggcagttttctttcacttcctgacatatgatgctcctctgtctttttgcttcattgtttccaatgggacatttgttatagttcttacctttacttctctgtatatataaggtattaatatttttttctcagttttcaagatttttcctatcattgattttaagcartttgaatatggtgagcctgggtgtagttttcttcttgtttcctgtgcttggggtttactgagtgttttgaatctgtggctgtatggttttcagtaaatgtggaaacattttgatcattatttctttaagcatgtttctctgtttcccaccgccccccaaacttgaatttacagatagattaggctactagaagttgtcccatagattactgatgtacttttcatttccttatctttaaaaaaaaaaagtctgtttcatattggatagcttctattggtttgtctttaagttcactaacttttttttctttcgtgatgtctaatctgtcattaatcccatcagtgggtttttcatctgagacattgtagttttcaactctagaagttcaatttggatcttaaaaaattttattttttaatccattccatgtctctatgtaacttaatctttcctctagcttcttggacacagggatatttcacaagtgttttatctgctgtctattccttttatcatcactgccattcctggatctttttctattgattgatgctttgttgtaggttgtgtttttctgcttctttgcatgcctgctttttttcactggaaatctaacattgtgaatttcaccttacaaagtgctggacatttttatgttcatataaatattcttgagctttgttctaggatgcagagaagttactcagaacaggtgggccctgtggaggcttacttttaacctttcttagttgggatcaaagcagcctttaatccaggcattttcccctagcgctgagataatacccatcagattactctacctgatgacctgtgaatttctaccttaactggtgagatcaaggactattcctggatcttggtgagctccagataaactttcctttgcttttaccattgggtctttccctgaacttggggaagtctcctcacatgcatgtactgatcaagcctcagccacaatctcaagggtaccctccagagacaactagagctctccttctggggcactgccttacaaacttcatctgcccgtgtctccgtggggctccattcagggcgcctgcaggctctgcctggctcctcagatgatgaactgggacagagagctcaccttgttttgccttattataggataattgtccttcattcctgtgtctaaaaatcatttcttaacatgcatttcttacttatttgatgcagaagagtaaatcytgcactgcacttttattctatcttagtgagaagtagaggtttgtaatcactttcaaagtgaaatcacactttgtccttctaacaatsccactcagagatcaatagtgtgcttggccacccttccacagccaagagagaataatcatgcagtgcttcagaatactgtattcccctgcgttcagagaaaaacagagacagcccagtaacaacaacaacaaaaatagcttgttttaatttaaagtagaacaaaatgagtattttttcctttgtgtttaagtcaggtcgattgtagataaattaaagggctttgatatcatcagcaaagcattcttaccagctcaggaacaaatgcaagtgttcttggaaaaggtttgtgggtgtatttagggmgtccttgttattttccctcgctttgaatgaaaaaagaaacttatttatttttatagtaatgtttcctcaaagtgattgtgtagcaaccatagaacataacactctgtgttacaaagtagaaacaaatagagctttgtacttagtacaggtcatgatatccaaactacaaaagtctttttaacagggtgaggatctgagtgagaggttcctgtttcctgacttgttattttgaagtgtgattgatactgtgctcttcaccagagaaaagtcagaaactaaggaaactgttagcaacaaaaaaactaaactaaaagtcattttggttgatttaactccaaggcgtcagtttcttagagtgccaaacccaaaccctggctgccatctttgccgctataaacgttcactccattttaggggagcgtgtttgcgccatgtagggtggaacggggagcgtgcgctgggtgagagccatagcagtctctccgtgatgcttctgcaccagctggggctggagcgctttgcccactggcagcttccagccgtgtgcctcggtttcctctggcatyggggtgggtgtgagctgtgttggcccttgcagagtggagagcagtccatgcaggtgcagccagcttggacaggtgcgtgatgggaggacaagcccacatccatctggacgaggaagtgctacgaggtcaggctgggtcaaaccttggtctccttgccactgataaaccaccatgcatggtccctggactcttgacgcctgtggtgtctctgggctcccagcgttttctccccacaatctcacaagtggtttttcacttccttcttgtaaactttcagatcacgtcccacctatgcactggtcttgctacaaacacttaccaaatagtagaggggagtgtgcactcctctaacaagagctgcgttggatgggcccatccacagaaagccgggagggatgcccgggtgtgcagtttccacatggggaagtcattggaaggcttctagcatgttccatgccatttgttttgtctcctcatccttacytcttgttcctttttttgtttcctcctctcctttcttctcccagctctgccttatgtctttggggatccttcactcccttgatggcctagaactgggcagaaagaaaagtttgcctctgtcctcctctttcctctcactcactccaatcccttatccgcagagagcctgctggagtccagggaagtccgtttctgctggggacatcccagcctccgccttctgggtccgggcagtgcccctggatactgacttctccctccctgttgtgtcccacctcgcgctgaatcgtccaggacctgttttgctattttgtctggggacttaaggctgttcatgggctttaatcaatgcaaggaagtaaaattcctgccaagctgcccttaaggtcatctgggggagaccccgccatgtaacatgatcctccsgcctccttccagccccagcttcattatatgtaaagctaggcttctgctgactctcagatcagaccgtcctggctttgtgtgcctttrtaaggctgtggttacacctgaggatctcggctgccctcctcttagctgtcagacgtagttgatggtgcttgggtcttggctgcacctcaccttcctggctctgaaaatgagtcactaaccacctcgattcctcgtgttggaatccctggcgtgctattttccgtgggaggcttttacttttagaacctgggcagccctgggctcctcgtcctgcccagggcggtgctggctcgtttttcagaccgtggtacaaacaggccttgttgatcttgtgccttttgtaggcaggtatgaggtaaagccctggtggatatataacctgactttagtttggctactgctttctttgaccggcttttacccgtgtgtgttttcaacttttgcaaaacagtccccgtgcccagagtcccagtggcactgctacacttggaaaataagcaactaaacacatgatgcccattcctaggacatcctcagatttaaaggaaccgtaagaacctcgggctgggctggaactgctgataagcagtggtgacagctgagcggtgcaggtacctagggcttggtcccggtaggtgactcacagagctgtcctccctgtgggctctgccctctcggatgaccagggacagggaacgttaggggatcttaagccaggcccttgggctttctgacagcagatcttattagaaggtctgggrggaaatgaggagcatgagaatggttttcctgctctagccccgcatccatcatctccccaacacgtccccactgtgggtcactgggagtgatcaggaagtgatgtggaaaccctcagcaagggttctagttgctaggtgatgagcctaatgtgtaagactaggttccactatggacgttccgtcattttttttttttttgtaatgaccttcttcccgtttggatggytcaccatgcatgtcccagattttctggaagtgcttgtagctctccagcttgggcgacttggaacctgtgactaccagggcaggccacttcttcatgggtgacccaggcagcagyggtccaaggtggaactgaaaatgaaggttgtgggaaacaggactaggtgtctccagtcccttcctcacctgtcatgtgttttaggatcttcccrtgcttaagttacagtatgttgctggagacsagagattaaatgcaggagtggggttgtcttcctgcttcccagcccgtctgtggggaacagcactgttctcaggcacgtagtacatatatggaaccatgagtgagtttgagattttctcaagaagaaaaggaaaatgaataaaaacgaagggtttaaagcagaaattgaataatgtattactttgaagataggctttacaaaaagaatatcattcttgaataaagtaaatttgccctgtttattcttaaaagctcacagcaaatttttgatgaagcagatggatttcttaaattaaggtttgatactccatttgattttttccttctctgtgattttaaaataaaatttattccttagagaaaatcagagtaaaatgcatgttctccattcctccaccatgcagtaagccgtgtctgaaggtttggggagtgcatgcctgggtcatgtctcaccccgcccgacrtatgctcctctctcccatctcatgggctcttcatgtgacatcctgcagggcccaccccaccccayactcagttgggctctttctggtggtggcttcatcccatctgcggccactggggagccctgacccacagtgtagactcttccatccttcaggaagcatctgcagggctcaggtttcagggacacaagagggacattctcacttargcatcatgtcccctctcccaaccctgtggcccctcttccattagacccttactgcctgtacctggcttctccmcatgccccaccttcatctcgtggccacrcagtgagagcatcacaccctcccaactacgtccagtcttccctcaaagcctggggaaccttgctctartgttaatgcctgtccaccttccccaccctctaatcctaaactcaaatcccacctcactcaaggagctgctccaggttccctcaaagaatgtatggcatttggcataaagttggtatactggcacaaagataacatagatccaggtcagccacccaatgggggaaaagagtggggtaaaaatacctgagttgggaatcagtagttacttataaaactgttctcagccaggcacygtggctcacgcttgtaatcccagaacttggggagtccgaggcgggtggatcacctgaggttgggagttcgagaccatcctgaccaacatggagaaaccccatctctaggaaaaatacaaaattagccaggcgtggtggcgcatgcctgtaatcccagctgctccggaggctgaggaagcagaatagcttgaacccaggaggcggagattgcagtgagccgagattgtgccattgcactccagtctgggaaacaagagcaaaactcttatctcaaaaaacaaaacaaaactgttctcacacctgcaaaatgaggtaaactggagcatgtttctatgagagctgttgtgacttgtgttgaggtaatccttccttgctcttcctyatgtgaccattaatttatggccagctgcttaatctaaaattccctgcaggatagtaaacccatgatgagaccttgacaaaagacaaatgcaacaatgagaacaagccttagacccagaaaataaccttgaggaacagggaagattcatggcaatgctgttttcatattgcaaaattaaggacgtttattacgtccagcatgaaaacaaagagttaaatctcgaggtgtgttctatcagccagtgatacgtgtgtcacttttgaaaagtaaatatgacagatttaactttaaatattctttcatgattgcttattgttttttttttcctactggtatgttctactgtggtcttcctcaaagaaatcrttcaattgaccttcacctccactacaaaacagctgcagaattcataaggaagttatttcagagccccggttgtcaccaatacatgttgggttttttttttctttttcttttttttggccggggggatggagtttcactcttgtcacccaggctggagtgcggtggtgccatctcagctcactgcaacctctgcctcccagattcaagcaattctcctgcctcagactcccgagtagctgggattacaggtgtgcaccaccatgcccagctaattttgtatttttcatagaggcggggtttcaccatgttggccaggctggtctcgaactcttgacctcaggtgatctgcccgccttggcctcccaaagtgctgggattacaggtgtgagccaccacacccagccccatgtgtttttcttttaaaaatatttggtgaatgacaacttcatttaaaactgttatttcacagggagtgttcagctgtcgtcacaagaactttcaaagccttcattcattgagctagcgaagctcactttaatatatctcgaggcccctgtggctggacacagaggcagatggcctgaagccagcccctagccgcagaagggtgggcaggaaggcccctgggctggtggggggccaccctgctggctgccccacctgcctggggtggggtgctcaggacagggtcgagcagccagtggtgctccagggaggagagtggatgacattggagcagatgcttgaaaaacgtaaggatgccaccaggggagaaaagagtgaaggatgttttcctcatctcacagccatcacarccattccttaaaagccatgaacttctcactcctcgtgcttgtgctctgttattgctcctccaaagctgctctttccagcccggtggatgcccctgcgtttgatggaaacacacgtgtgagtggaagcgtaagctgaggtcasaatggtgtgatctccacatactagagaaaaatacattcccttcagtttctggagaaagggaaggagttatagtttgaagtaagtcaacatttatggtggagaggaagagaagtaaatgtacagctgacttttgaaaatgcttaagggtgttracctttaactccctgcacagccgaaaacctgtgtttgacttttgagtccctgaaacttaactgctgatagcttactgttgaccggaagcattaccaatcacataaacagtcgattaactcatattttgtacrttagatgcattatatactgtgttattacagtaaagtaagctagagaaaagaacatgttattaagaaaatcttggctgggtgcggtggctcacacctgtaatcccagcactttgggaggctgaggcgggcggatcacgaggtcaggagatcgagaccatcctggctaacaccgtgaaaccccgtctctactaaaaatacaaaaaattagctgggcgtggtggcaggygcctatagtcccagstattygggaggctgaggcaggagaatggcgtgaacctgggaggcagagcttgcagtgagcagagatcgtgccactgcactccagcctgggcgacagagcaagactccatctcaaaaaaaaagaaaagaaaagaaaagaaaatcttaaggcagaggaaatacatttactatgcattaagtggaagtggatcatcatacagatcttcattctcgtcatcttgatgttgagcgtgctgaggaggaagtggagggcatcttgctgcctcagggtggcagagaggtggaggaggtggaaggggaggcaggagagccaggcacacttggtgtaacttttgttagaaaaaaaccacatgtatatggacctgtgtaattgtggctgtttcatgtagtacgtggaatgaatgaaaaaatcacttgtttgatgcatgaccaaaaggatatttaattttctgcattagaaaataaaaagtgctaaaaatttggcagttttctgtttcttctcaaggttgtaaggggctgcttataatcattaaggtaaatggcttgggaaaactattccaaataaatggcagatgtgcctgccatctttgatttcaaaatacgttttcctttagtctctgtttgggaattgtgggaattacaggtttactttttcttttctttttttaaagtaaaggcaagaccttgttttcacaaagccaattataaagtgtttggcattccctagacttaattttgggggaaaaaaatagcacagcctttgtgtttcacatatggattcagcatttcttcatgttcttcccatgtaagacagacacacccctccaatctgagggcccaggaagtgccagagaggaatgagacctgcgtttgtttggctgaagactgtgacttttatctgagacctacttagattttagtgcattcagttccccatcaaaatatataagtagccaattcatttctgttctcactcagagatagcacaaaaataaggacgcgtgtaaagtgtgctgcagtgagtgggtacatacattgctaagtgctgccattgaaaaaattcattgtggcaaaggaccttttttcaacaatgaaggcagcatctcttttcctggatcgagacccgtaggcacagtgaaggaacttggaattgtgtggctggtggcgtggctccaatcccttggagggaccggctgccacagaccagcgtgggctcctggcacacagtgagtcacccggatccagccagtcattcaaaaacaaacttgagaaggatcactgggtgcagcttctctacacgtggcagacaggggtcccataggctgccggggccccgtgtgtggatgctggactggcttctcctggaagaatgcccgtgtgatggcccgtccgctcaccatggctgccacaggtcccattctggcaatgcgccttttatttcaaaagaatttttccttttcctccacacccgcctttctgttttccaaacgaagagcctccacctacccaggctttattataatttaagtaaatctaaaatgccaatgtttaaaatttctcacatttctatcatattttattttttacttctaaaagaactttcatatcaattttttcaactattcaacaaacacttatttgaaatatgttaaatattcagcaaaggcctactttgtgctggaagaattctcattcgattcttaaagactgtgctgagaggtgactggcctactgtcgttaccgcatttcacagatgagacgccttgggttcagctcacaggagtgagatgcttctccaggcacctgtgtggagtgggtggccgggtggacctggacctggacctggccacctgtttaaggcctcagctctttccactctactccactgcctgtcatttgtcctttccatgtttagccatatgtgctcattcatgcatgtacacacacgtcacacacacacagacacacaccacacacatacatacaccacacacacaccatgcacacggacacacacaccacacatacacacgcagatgcacacacacccctacccgcatatgcactcacacacaccatgctatgtactcacaaacacagcgtcacatcataaacacctcatatcacacactaagcacaattacacacacacgaacactcacacaccacacactcacatccataaccacacacacaccatgcacgtagacacacacatcacacatatagacacacacacagatacacacacataccaagctacatacaaatacagcctcacatcacaaacacctcacatcacacactaagcacaattacacctcacacacacaccgcacactcacaggcatgcaccacacacacacacacacacaccatgcacgtagacacaccacacatatggacacacacacagatgcacacacacaccatgctgcgtactgacaaacacagcctcacatcacaaacacctcacatcacacactaagcacaattacacacacacactcatgtgaatacctcacacacatgtgtcttggggygaagcaatacacaggcagaccagcagcagcacgtgcgtgccaggagaggtgatgggagtctgtgcctgggagggcagcagyggctcccggttacactcagagaagccgaggcccacggaggtttgcgagttgtccatcrtrgtaaagactgggtgtcattctcagattttctgaatccactgttcagttccacaggccctgccggagtgcccactgtgggctgtcccggaagtgcaagcaggatgaccacaggccttggatccyggggaatgtatacgtgtgtagaacaagtgttagtgatggatacttgggagtaggacaggactggcccacttgaggctgcatctggggatgaagctgcccctggttcatacggattcacacagacagagcaacttgggctcctcatttcagttctgtcactttgcaaagctcttggtagagggcgagttgtcctagccattcagtccttgtaccygagaagcaggagagaaaatgtcccagcacccaggggacatgtgacatgggcagtgcccaccctgtgccccactgtatccttagcacctggtgtgtgctcagcagaaccaacagatgtttcctgaatgaacgcatgaatgcatgaatggaggagcccagtgggcgaagcatcattcaggtattggaggggacggtgtggcggaagtgcccgagacagggaaggaggcaccagcacagaccagtgtcacaggccagctgtctgcttattacccgtctccctcctcgcaggtgccgagattgctacatcccggggtgagatgtggctgtgtcctcgtgacccggatttgccaggaattatctcacctcacaaagacwcagcccttggccataagagcacctggaggaaactaggttctaggcaaaacccctaaaacagcagccctactggtgttggccacaccctcatatgtaaaatgcagtttcacctaaattctgttcatgatttgttttaggcagattaatgacccccacagatgtgtacatcygaatcctcggaactgatggatgttttaggttgtagggcaaaggggaagtcaggagcttctcagtgacctcgagatagattctcctggatcatctgggtgggcccagtgtaatcacaaggtccttaaggtggaagaaagwgtcagatgagggaaccagagtgccggtggcccagtgcgcaagacttgccaccattgctggctttcaagacagagaaggcggccggccgtgagctgaggcatgcaggtagcctgcagaaaccaggagaggcagggaagcatactcyccgctgagactccaggaaggagcgtggccctgccgacaccttagctgagtgggccctgtgttggaattctgacctacagaacgataacatcataaacgtgtgtggttttcagccactaggtttgtggtgacctgttactgcagccccaggaagcgagttcatgggcctagtggtcggaacacaacacgcaaggtctgggtagccccagcctacaacagggaggctcacgggcctgagagaacctgctggacgtttatcaacaaaaagcctgcagtgggaggtgctgaggaacatggtcctcaaggtttgcaaggactgaagctgggtgccacagcctcgggctgagattccgacgttgagaacagctcggtctgtgctgcggcgcaggcacacgcacrtgtttccacggtgcactctgcccaatttctgttctgttctaagaagaaaagcgtccagacggagagttcccaaatagagttttggcccaaaagcaacattttaccgagtcaacacaggaaaattattttaaaaggctcttgggagaacaaagatggctttgtatttggtgctgaaacccaagtaggccacatgcccttgtcctgcagatctcgtgttctccgcgttaacataaaggagttgatgagatcctcggctctggaacacagggaggtgtggagccttctgtagggtgcaggtggccagctgttcaccgcctggatctgttatccatgtaacragtcagyaactggggaggtttagggacatggggcttttgtatgctgtcagatacatccattggggttcagagactggcacgggggccttccagcaggtgggctgtgatgccattcctgcccagcagtgctgagcaaagccagagcaggccaggcaagtcagagacacatcagcgtcacggggcttgagaaagctggaaagtgtgtttttcctgaagcgaagctgtcccacaccggattaaaccactgtaacatgcttagcaaattgaagtctcagygtagtggccattggctgcccaagagttgaccaggagtgagcatcgcacctgcccccaggactctcgtccgccctcattctcagtgctctgcctgacgcaggatgctaagcgctgcatgcaccttaacatagtccccctgactaccacctgccacacaggcattgccagtgttatccccacattgcagatggggatgctgaggctcagagccgtgattggctgtgaactcttaagtgctggtgcagtgtaaccctgggggtctggctcccacccctcgctcctcttctctgctggtccacctcatgccccgaacccaagtgcagtggaagggcccctggacacctgcatcagctctccctgggcctcgaggtgatgctggctgagtggccttgggcatttggagcacatgtcctcaaattccagcatgcacaggacagcctgtgggttaatacacatgggggcatagaccccacaaccagccttgggataccccttgtgcacctaactgctctcctctgcagaggagaggctgtcaccccaaaggtctttctcttttagttttgtaaaaggaaaacatattttcccttcatctggagcagacttaccaaaccccatgacagtgagccaggagcagcgtcagcatctagtacagcgggttcatcaaacaccaggaagatgtgacagagacaggcttgacttctatgggaactcggttcctgatgtcgttgtaatattggtaataaagttaaaccaaaaaataatagatgaaatgaagtcagaaagacatggttaaaatagttactgtgagcaccagcttttgaaattagggtaggtgggaagcctcaggggcccccagagtgggggctgaacagacctttccacacaaagctaagctgagtttgcatgaacatcttcaagtgttcgtgtttcctcctggtgcttgtacctccgtaaactcactttgccccatttgaaattgccgtgtcagaatgtagcttcttccgggaaggtgcacggtggaacagtgccagggagcagcagcgcccagcaggcacgcgtggagtgaaggagcgtggtcagctcccagctgcaaccgctgggtcacaaggggagggcaggtgagaactcaggcaggagaggagaggcacttgggaggcagaaatctgtgctgtgtcccctggggaggcaggagcaggggacaggcggatatcagagaaggaaggaaatggttcttggggtgttcagttggtgtggggtgggccaaggagagcaagggaagcggcttatcttgtccaggacatagaaaactcactgaagccctacgggaacctgcagccaaagaaaacccagcaatgccgattctgtctttattttaaatgtcaatgtttcttcctcagggatatttgttcactccttttgttttgtaaaagatattgcattaaaatagcgttcatcctgatccctgagctgttgcgtgcacccttgcgttttgcacttgatgtgagctcctctcctgcctcaccctggcccccaggcgagtttggtgtctaatgacaaggttctttgtcgcttttcctccttctttagaattcctgagactgaggaggagttggaggtatccatcaataattcctattagtgaagaattgtttccactctgttgggttttctgggtttgttgttgttgttggccaggaagagatacattgtattccagaacttttacctaatttataaatgtaccagttgataaatacttcattataaattgatgtgtttggactggattccctcacagtgatgccctgaagctatatgtactttgggtttgttgaattttacttctatttatttattttgagacagggtcctgctctgtcacttaggctggggtgcagtgacgtratcacagctcactgcagccgcgacctcctgggctcaagcgatcctccacctcagcctcccgagtagctgggaccacaggcgtgcacttccatgcctgtcttgaattttatttctttgtggaacatgccaatgaatgttatttagtttaactttgtttttttgtctgtttgttttgtttttattcttagtgaggaattttgctgaacaccattttggttcatctctgagtttagggtgcttgggccgggctgcccacccctgagtttgtagtgccagcctttagaggctgtaaattcccagaagctacatttgagcacccaacacatcagcgctcaggagcaagaaatgtgaggccgggagagacgagctcccaaatccgacctgcgtttggacataacgggggtttttatgaggaaggcagggatgtgagaggggagagcccaggatgaaagctgctcacctttctgggccagtcaaaccagacaccatcagggaagtctgtgtgaccgaaggatcattgttttttgaaagaaaaacaagttccgtaaccattcggatggcccccgagttaggatgtgaagttatcgatgactagtgatgcccctgtaccaaaataactgcgggcaagcaggcatgggaagaggaaggaaaggcacagagaaagggaggggccaaacaggcaccttatggtttgttttttaaagtcacatagcctccgttacatgaggacgggggagtttgtttcttctataggggacacagagtaaaaccactcaagccagtcgggggcctccgagtgggatccctgtaccgggctggtggatgcgggaggcgcacggtgccctcccgaggaggagtgaagggacacgggcacagctgtcaggcagctccaacagaatcacagaatcggttttgccccacggtctgcagtttgttctccctctcagtgtctgaggattgcccagttcactcagccgtggagacctgggcgctgtttcaccagatgggagtccggcacagtgcccgcaggaaaagagcgtgccttctctgtggacttgaatctttgctgccttgtgccgccctggccatttggttggacatccacgtagaggctgcagtaggctgtctaagcccccaggagctattgcagggtcatttaattacacacaacatctgtcacccagatgaatctgggcttcggcccccttatctatgacaaatggacttgcgtgggtgtctgctgaggctttaggattcccgcctgagccctcctggtggctatgggacttcagactgcctggggcagggggagggctggacaggcactggtttcccccacgcctcccagcactggcttggggaaggtgcggcctgtatgtagaattcagaccttatagcatgaagcgcacactgcaccaggtgcctccagagtgttgattcgcctccaggagacttgtttggagttttgatattgttgctttggggtccatctcmcctgccagggcagggctctcattgctgagactgcctatgtcagtgaagctgaggagctccttaactccagtgatgggagtagctggctgaatgcaacccrgggcctccctccctcttccagttaactaggccggattccagatttgtgaccctgacgaattttgcaagggttatatttttaagaagcttaaaatgaagtctataacaacacagaagtcttacatttaactctctccttggacaacttcttattgtgctctctgggtaacacactttcagtttaatccctgtagatgtccctggaggatatgacatagacgaggagccagcccagggtgagatcgggtagcatggctgtgctggcacgtggagggtaaaggcagagctgaaggtctctctccccaccctcaccccccagggcggcaktctcctggtgatgtgcctgccccaaaagagtggcagccagaggagtcccagctctgaccttggtgacagagaaggatctgcgtgctgtggagctgggctgcccttcttggatggctgtcccccsaggaggggcccaaggatccactgagccccctccagacctgcagcactggcacctggagcccagagcgtgtcatgtctccgtatgtagagagtctgtaatttctaagagaaaacctagcacaaaatggaaaagtgtggcagaaagtcaggaagaattgagttcaagggagcacagaacctctgaaagggtggggtgggggcaggggccaggggccagggcagccaccatggcactggcctcaggggactctctctgagggggctagcctgtcctcaagccactgaggagtccttattcacaaagacatgtactttgtgaattcttttctgaaaaaattacatttccaacttactagaacttgcaacagcacagatgaacctggagaacattatgttcagtgaaataagccagccacacagagacaaacactgcatgatctcccgtacgcgtggaacctaaaaatgttgaattcatagaagcagagtagaatgggggttaccagaggttggaagggacttggggggattttggtcaaaggatacaaagtttcccttagacaggaggagtcgttttaggatctgttgtacagcacagtgaccatagttaatagcaatgtgtatttcaaaattgctaacaagtagattttaaatgttctcatcagaaaaaaagatcggyatgtgagatgwtaatggtttgatttaaccataccacagtgtatacatgtatcaaaacatgacattgtgcctcatactatatacaattattatttggcaattaaaatttaaattttttaaacatctccaaagctacggaaggaggaaggcctctacaaggccagctcaaattacggctgtcaccaccttctgtcaagtgtcacattgtcctgtggcctagttgacccatcccagagggatatccggcaggttccaggcaggtagcacctgcccaggacacatgtggctctgacgatgtctgcctcacctgtggagggtccatgactatgggagaaggtcccccagtgtgggtgggaagaagccacgttgtgaggtgggctagcagctccccgatgactcatgagtaccacgtttgtgcatgaacggaggcttcttttccaactccagctgctcgggcattgctgcatgcatgcacacaggccataattagaccatggcagtgtgcattaaagaggccagtgccacactcatatttrtaagctctgaaacaaactacttttttttgagacagggtctcgctcttttgttcaggctgaagtgtagtggtgctattgtggctcactgcagcctcaacctcctgggctgaagcaatcctcctgcctcagcctcccaagtagctgggaccacaggggtacaccaccacacctggctaattttgtttctgttttttatagagctcaggctagtctcgaactcctcccaccgtggcctcccaaagtgctgggattacagatgtgaaccaccacgcctagccctgaaacaaactattttcacatgttgtccctgttcgttttgtgttgctataaaggaatatttgaggctggataatttacaaagaaaagagatttatttggctcacggttytgcaggctgtacaggaagcrtggcaccagcatctgcatctggtgagagcctcagctgcttcctctcataggggaagggagaggsgagcagaatcacaggggtgaggaggggggtgccaggctctttttaacaaccagctctcacaggaactaatagagccagaactctcgcacatcccctacacccccagggcaatcatctatccatgtgggatccacccccacgacccagacacctcccatgaggccccacctctaacgctggggatcggtcttcagcagaggtctggaggggacaaacatccacactatagcacatgtcaaaattttcccagtgtgtattattacacaggactgcagagtgaaggaataaaatgatatctaaagaaatacttccagacagatgtcttagtgctagtacctgtctggcacactttgggaaagcaagtacccctactagtaagcataagtgtcataacatatgactaaaaccaaaatcagagctcattctgtggcattaggttgttattcccttcatcagaaatccaaaaatgttaaaacagttcttgttcctatttacaataggaaaggtattcaatctcaaatcattgggcagagtgtagggaagaggctgtcactctctcttctcagcaggtggcagggaaagcccaaggtcgccattcattagatgttaaacatcggactggaggtgccaagttggcgcaggccctccctcygtgggcctgtgtcttagtcacgtggacggtggtgtcctgtgggctgggctgtgtggctgtgggctgtgtggctgagaaggtggggatgccctggctgattcagtccctcagaagggggcgctgctcattgttgtatgcttgcgcggtcacataagatacctgggatatagccagttgtaacctacacagttttcccaaagaaaaaacaattgtttttcctaaataaagataggagagaaccactgtgatttagcaatgcccrtttctcagcacttcctatctcccaaatactctaaaattgggaggtatgagccagttgagttttgggccttccttagagctgctgttccgacctccagctgtgagtctttggacgttgactcaaycccctcttcatcctgataatgggaatggcacaccttccagggacactgccaagactgactggtgacaatgaccctgcaatggcctttgtggaatccaygtgtgtggcctccagagaagatgaccatctgcatggcccttctcactgtattttacccaaggaggaaaactcagtttgtagttagttctgcgtttcagccttgttatccattctcggaatattaccgggtaaagtcagtttcgcgagggcactgctgctgttgatgcttgactgggaaaattgacgtcggcttccaagccgggattcacaaaggtgtcttaggtcactgcacactgtgcccagggaaatcatgtctccatggtatattttgatccatgtgttaaagtcccctctattcccagggctggatcttccaagacggggcagtgtttgtttgcttaaggtactttactgatcatactctgtagcccattacaatttagggatatttgcagtaaatatgttatggagaaatattgtgatattttttggagatatttccagagattttttttttgcttcttatatttatttatttattaaagaggttgctttgtgatttttaattctgcgtggtaggagaagccagcctctgggcagggtgatgttagtaagggactgatcggagggtgagtgctttcagtaagttgttgcaagagaagcctcagggaaaggcacatctgagggctttgacccaggctgccaccttcacatgagtgagaaaatcaatctgcctgtctggcttttaatcccctcataatgaaaaatgagagagagggaccttataatcagtgaagccttttcatcttcagaattctgatttagaggaatcaggggactctggggaaatggtgtcctggacaaaacccttctctccctcccatacacatcctgaatgaggtagctgctgtatccctgggcatctggggcaggacttgggttccctgggtccctagacagcactggtggggcatcggagaaccctggggtgagtcccacagagcagagcatcttggaggaaacttgggcttgcagaggtctgggggcctccagtggaaaagaggtcaactgtgcatgcaaaggcgactggatgccctggttccccaggctgattttcccttgcttctgagggaggwttgggggaagttatgtgcccacaactcttgggaggccacttcaccttttctaagaaagggatctgccatcactttagaaagctgacccaagcatgctatgctaaccaaaatagtaaccactcatccgcagggtcctggctgccagggagcggaagagggtttggacaaacagaactcacacccagcgaagtggagctgctggggaagacctgtggccacttacagagaactacttataatcactcagggagcacaatgagcacttagaaggggaagtggggaaggtggtctacaaaaataggaacaaaaactgcacagtactcagaaacttaacaagaggcttaggagcttyatgaagaaagtggcgatatctttttaaagggtgtaagygtgcatgaggcactgcagcatctcccagggccctgggtgggaygggaagagcaggtatgattgcagtgctcattctcccaagagctgcatgcatttctatctggaggcttctcttggaattgaataaaatggccttaacatttatgatgcytccaaatgagccaagacagtcttaaaaataagattgaggccaggtgcagtggctcatgcctgtaatcccagcactttgggaggccgaggtgggtggatcacctgaggtcgggagttcgagaccagcctgaccaacatggagaaaccctgtctctactaaaaatacaaaaattagctgggcatggtggcgcatgcctgtagtcccagctactcgggaggctgaggcaggagaattgcttgaacctgggaggtggaggttgcggtgagtcaggatcgcaccactgcactccagcctggggaacgagagcaaaactccatctcaaaaaaaaaaaaaaaaaaagattgaaaaggagcaactttttgtaacagatattggaactggggctgcaggtgaagttgtgcaggtaaagatggtctcagygatgagagccctgccctrgcaggggagatggaactcaaagcaacaaaattgacaytccaaacaagtctcctggaggtgaattaacactctggaggwgcctggtgcagtgcgtgcttcgtgctctaagatctgaattctaaacgcgggcctcaccctcaccaggccagtgcttggggggttggggttggacatccacatagaggctgcagtaggccatctaacccccgggagcatttgcagggtcatttaaatacatgcaacatctgtcacccacgtgggtctggggttggcccccttttctatgacaaatgacctgcatgggtgtttgttgaggctttggggcatcccgcctaagccctcctggtggctatgggacctcagactggctggggcagggggagggctggtggccactgtctttgcagagagcagagcaggacctccccagtgtgctggcccagggccctgtctctgggctccaccctgagcaggtacctttgcatgaagactcctctcagcgctgaagctratggtggcactgatccaacatactgtactaccatgccatgtggggttgacatgagaaaggacaagtagattaatggaacctaataagcccaaatcaaatgatattatctgtaacagagtgggtatgtaggttcagtgggaaaagaactagttagcaatattgacacaattggctgtctggaagaagcagcattggatgctcaggtcgtaacagaggaaaatgaacatcagttggtttgaccatttaaatgtttgttttaaaaaaaaaatactctgcactcctcccacaaaaaacaaacaagcaatacttggaaacaacatgtataatacagggacataggtgactgtcttagccaggcctggagaagtcagatatatttacctatataaacatctgaaaggattatataacaaaattatgctacaactagaaatgttaaaaccgacaaaccatggctcttagagaaaaatatttccaaagcaaaagacagaaaaggggttaatattttcaatatgaatgctctcacaggtttcgtggtcaagaagagaggaaagaatacaatagaaaaagtgagggaggccaggcacggtggctcacacctgtaatcacagtgctttgggagactgaggcgggagaattgctggagcccaggagtttgagaccaccctgggcaacatagcaagactccgtctctacaaccaagttaaaaaactgttgggcaggtggtgcatgttagctactcccagctactccagaggccaaggtgggaagattgcttgagcccaggaggtcgaggctgcagtgagctgtgattgtgccactgcagtaagctagattgtgccactgcactccagcacgggcagcagagtgaaaccctgactctaactaaataaatcagaagaagaakaaaaaaagaaagactgaaggggaaacatgcagagttaattcacagaggagcctgccaagtggtctgggtggcagggagatgcacattaaaagaaaagtagatgtcctgccctagccaagtgtggtggggcacgcctgtaatcccagctactggggaggctgaggcaggagaattgctgaacccagaagccggaggttgcagtgagtcgagatcgtgccactgcactccagcctgggcgacagagcaagggtcttgaaaaaaaaaaaaaaaaaacacttgcagggaggttttaaaaagacaaagcagctggttttgcagaaaaaagggcctggagactcttagatactgacggaggagtgtgaattgttacagcctcttaggaaaaaatatttacaatgcaaaacttctccgtaggaataaggagcgcacaactccggcccatttcctgggattgtcataccaatgaatgaattaatgcataagaaattaccttgaaaactctagaagtgccccggagtgttttacatccattactagtgggcagtattattgagatgtcttgaggtctactaagatactttgagaatgtaccattatatgcagaaaaggccacagtagaaatgatttgtcagaaaaaaagtttcatgttaaaacttactaagaggtttgtaagtgatactgtgtttaggcatcgttttgctttcgcaaactagtgtttcctggggaaaatagatttaatctgggtgttcagtgttgcattgtagtgagtaattatgtgatgtgagcatagcatggtgtgtcactttctctgggctgagagactctgcatcctttcttcattctaaaaagaggccagaggccctgccctctgggggtgagttccgctgggacaacgttcagccctttctgacttaccacagagcgaccagtattttccattcagcttgactcatttgagcagtctgctccatgcacacatgtgcttccacacatctgggacatttcttagagctcacatcacctcgaggagacatacagaatagaaagtagttcagaaaatacattttgtgcatctagtctacactaccgtatttttggcaattttggtatcagaagattcactccagaaaaagcactccaactatcatttctcactgcctctcacttttagtattagattcagaatccattagcatgtctcactgaaggagcagatgtttcagtttatggtggaaggaagacacattctgggcgttatgcaacatacttggctcacgttcccactgcggattttgccattgctgtttcagtgctgagttctcaccttcatgattttaaaaatacattggttctgtaaacatttacttaataatccattttccagaatctttgtcctgggtgttttaaagcagcatttctcaacygggagcgattttgcacccccaggaggcatttgacaatgtttggagctgttttaggttgtaacaacttgtagggagggagccctactggcatctataggaggaggctggggatggtgctcagcaaagtgcagagcccagagctgtccaccatcaaggatatccagccccaaatctcaacagcgctgatggcggagaaacctttgaaagctattgttgctggcattctgggctttctacttctctgcctgatgtataatgagtgtatatgaaatctgcgataattttagagtcttgtttggtcttttttaagtgatgtaaaattattttctctctgtctctgtcacacacacacacacacacacacacacttctttattggtccaccatatgaaaaataaattccaagaagggttttcttattcccaaggcatcggccttggcactaatgattattccacaagattcttggatctcttgtggtgatcctcccatttagggctcgcctcactgtgtcctggtttcacatttgctgtttgtttaaagtgttacacacttctcctgttagttggccaaaggagtcccccaggctgacctcacttgggaggcctcaatctagttggtctgcatgttaggttcattaacatgtcttcttttttcttaaaaaatgtattctggccaggcatgggggctcactcttgtaatcccagcactttgggaggctgagtcaggtggatatttgagcccaggagttcgagaccagtctgggcaacatggtgaaaccccatctctacaaaaaataaaaaacaaattagctgggtgtggtggtgcacacctgtcgtcccagctacttggtaggctgaggagggaggatcccttcagccctgggagttggaggctgcagtgagctatcatcacagccctgtactgcagcctgaatgacagatcaagaccctgtctcaaaaacaaacatccccgcaaaataacacattacctgtttcatctataaggcacaaagcatccggatttttctaggtttagtcgaatgtaacacagatttaattggagctttctctttgtagggattaattgttctcttccaatgaaataatacagaatgatactaaacacataatcatattttatataccaccgcacctcaagcagtactgtctgtgttctccatttcatggaaatcctgtaagcaatcttaccatctttctaataaaaaaatcaaagtaacagctcttgttttaattccaaaccacaaatcaaagacaagatataacacgctgctcatttgtactatttctgattgttttagtcaaaatcagacactcacttcaacaataatagtgaggaaaaaccatgctcaaaaagaaaacaggagatgtgaagtcaaaatagtggccacggcctctcacttaattgaacagtcactgttgacagtctggtgacagccagaagagcgtgaagcgggtgggacgggagcagagggctacggggaaatgggtcagtgtctgctgggggagactgtagcgatcctacagacccccgttctgcagatcaggaactcgggcactcagagtccaggcttctgggctggcgccctgtcttactggggatgagtcatcaatgcacttgagactgtgtgtgcaccgtggctttgtgaccctaaatgaaagtagtggccagatgtgaagcaccctcgttaattattgatcattccaaagccagctgtttagtgctgctcctacatgtttcctgcaggagggattttgtgaggaagggtgtggcggctttgtgcagaaggaacttgtcaggtggccaggctggggcccctcaagtgtcaggtgtgccctgcccacgttgggagcacctctcaaagccaccaaatcagcctgattaaagccaggggaataaacagctaccctgccctagcgggaactctctcagtggcttgtttagcccagagggaagtccccaaggtgatcctgggggagggcagtgtccttctatggccacacctcagatggtcccaactgcaggtggtaccagtgagggaggagttcatccctcatctatgcaggccgatgtagggggcacttcccagtttgtagcaaaaaaaacacagtttggtgactcctgatcttggacaagccccctccagttgtttgcacattggaagtggttttggcaaatggactgaactgtgttactccatgtctgtgtcaaacactggcacaaatctggaactgtctgcctttcctcccacctttttcttttctttttctttttctttcttctttttttttttttttttttaagaaggagtcctgccctgtcatccaggctggactgcagtggcgcaatcagggcttactgccacctcaactttcccaggctcaagtcattctcccacctcagctttctgagtagctcggaccaaggtgtgccagcacacctggctcattcttgtattttttggagagatggggtctcactatgttgcccaggctggtcttgaactcctgggttcaaatgatcctcctacttcagcctcccaaagtgctrggattacagatgtgagtcaccatgcctggcctccaycrtttctcaagcttagtgatattttatctcagaccacattagtctctgcactgcataattttaaagggaaaaatggaaraacttttttgcttagcactttatagtcttcatgagatattcctcctttaggctaccagatcagatgtgctttcaaaaccaaatctctctaaggcttcccagaccctggagtcacccaggtttgtgtgacttttgggaggtcagtctctgcgcgtttggtttccatgtctgtaagtgggaacatactgtcaggatcgtgggagggttcactgagagagactgtgaaatgttctgtgcaggcctgggtcataataggatatccagcacagctttgctgattttttaatgttgttattacaattaagatgataatgggccaggcacggtggctcacacctgtaatcccagcactttgggaggccgagacgggcagatcatgaggtcaggagattgagaccatcctggctaacacggtgaaaccccgtctctactaaaaatacaaaaaaaaaaaaaaaactagcygggcatggtggygggcgcctgtagtcccagctactcggaaggctgaggcaggagaatggagtgaacccaggaggcggagcttgcagtgagccgagatcacgccactgcactccagcctgagggatggagcgagactccgcctcaaaaaaaaaaaaaaaaaaaaaaaaaaaagatgataatgatgtctcaatgctgagaggaatttagcgtctagagctcctgctggtgtggcctaaagacctgtcccaagctcttagtcgtccatggcctttgtaggggaggtccacttctgaagaacagttctgtcgttcaaaagactacatggtcttgctacagctgggcatgaaatgtgcttgagtgatgcrcaagaggactgtctgccttcatggatgtgccactggaagttactgtctccaaaaatggagtaaaactgcggtggtgacgggcacacattcgagatgtccttccagccgtgttcactcggccgtgggaggtgaaggccgaggtgtggaggcagacctgtggctgctggctgggstggcaggcacccaggaaccctgtgtcctccgggccctgtgtggtcagccctggcccaccctgatgccgtgtgctggcgtggcacctctctgcccccagccacaacgccagcttccccgcctgggcacgaccttgcctgcatggcctgtgctcagccctcagctctccttctccccacacttctccctggtgctctcagtgatgacatccacagtgggggctgctgtcacctctgtgcttaagacccccaaatatttctgtctccatctgcctgtcttcaaagctggagacacctccggagascggaccccgcacagccccaccagcttcttgaactcaaagttggtcactgttggactctgtcccttctccaagcagaccctgcccctgggcgaggtgggtggtgcccccattccagccaccagggccagagaactggatgcccattcaacgaygtcctcttcagcagcacagccagacttccccagccagccgttcttcctgtctctagaggtccgtgctgataaaagcctcaagaagggcgtggttgagtggctggtattaagagtgttgtgccagtgggctcgatttctgtcttgggggtatgtagaacctgtgcatggggataaattgcagggtgagatgcctctcctgccactcactgcttctgcctgcccttcagtttctgtcactacagcctgtgagctgctccttccagccagagtcacgagaatggacgttattaagtgtattcgtcagctcaggctgccgtggcagtggaccacagatggggtgacttcaacagcaggaatgtatcacctcgcagttctggagcctggaagtcagacaccgaggtgtgggcaggatgggtcctcctgaggcccctcccctcgccatgttctccctgtccttayagctgtgtgcgcacgcctctgctgcctttctcttataaggaccccagccacattgcatttgggcctagccttatggcctcattctaactttaatcctctttagagcctctctctccaaatagtctctcgggggacacagttcaggggacattaggaaaggctgttagggaaatgcagccagtggtgacatggcagggttgatgtgggcccaggctccttgccgggtgctccagctggagtggttgcaggatttggacccctgaggcatctcttgcctttttggtctgctgcagtaaggaggggcctgtcccgctgttccttcataaggggctcctgaatctgagtcttccagggtctgtccctggtagggattcccrtggactgcagggccttttctttttcttttttttttttttgacacggggtctcgctccgtcacccaggctggagtgcagtggcgcgatctcggctcactgcagcctccacctcccgggttcaagcgattctcctgcctcagcctcctgaatagctgggattacaggcacgtgccaccacacctggctaatttttgtatttttagtgagatggggtttcttcatgttggtcaggctggtctcaaactcctgaccttgtgatccgcccgtcttggcctcccaaagtgctgggattacaggcgtgagccactgcacctggccagggccttttcttagaagccagcgtcctttctgcagcccatgaggaaccccttcccccactcccacaaaccaggacagtgacctgaggtctgcacgtggcacccccatctctccatgtgtggagggtcctcaggggggaatctccttcagagcccagatgcctcccctgaagtttctattttaaaagcctcctggatggggcaggcaagctattgttttatgattacaaagcagatggaaactgactttattttggatgagagttatacatggaatgtagttaacataaactgaacagagacagtgccttgcggtgtctctcctcctccgcccagggtgaggcccaggactgcccggtctcytggggaccccatcgcaacaaagcctgccccgccgatgctygggcataggctgccttcctctgagagcaaactgtgactgagcattgggaaactttcttccaaagggacaggccctttcaaatggcttcgtgtcctctgcaggagcccagcagacgctcatgagaaggaagaaggacaaaaaagcttgtaatgacatgaagtcaaggcttgacctttggaaaaggaagtaggcacatggctagatatgtcagtgtctcagtcatcatagcttcctgtctgtgctcagaaggggtccgactggccttcrtaagctggacggcctggggatgggggccactgccatgcctcctctcagacctcgggctggggcctgaggaacgagcctctgcatggccagaggaccccatggttccctggactgaccatgctgggaccacatggcctgcaggtgaccgagcttgtcacagcaggagaagcagctctgaggaatgcttgggtaagctcaggaagaacaactttgggaacactttcaggggcttgactccacagtccccaaagggcgctctctagcggtgatagcttgccttgcatttgttttcgaggtcagaaccgcatcatctaatgtatctttgttcccaacgtagtgccccagagctatgctttgtacataactggtttggtggatcttgaattagaggatttaaaaaaagtagaggcttaaaatgrcaggggacactcctctcttcagcatctagggcagccgatggtttcctaggagcctctggaactttgccrggggggggtccctcaaatccacacaggggaattaaatagaagagagaaaattggcgtgtggcttcctagctctgcaaactctccatacttctcatccaatgctcagggagctgatagatgtggcccacacagtccacctccagatacaaaccaaactccttgctctcttggaactcgggtgagagtagagttttatggggggtgtaggatgggaggattagtaagatggttatggtaaacatgaaatgtgttttagtgctttttactcttttacagtatcacccagaggacagattttttgtttctttgtttttgagatagggcctctgtcacccaggctggagtgcagtggtgccatcacggctcactgcagccttgatctcctgggcttaagtgaggctcttgcctcagcctgtcaagtagctgggactacaggctcgtgccaccatgcccaactaatttttttttwaatttttttktagagatgggggtctcactatgttgtctaggctggtctgaaactcccagcctcaagcaatcctgctgcctcagcttcccaaagtgctgggattacaggtgtgagccatggcacccggcaacccagaggatttctcaatgagatttcctctccaaggtatgtttccaaggtgtaacataccttgttcagataaatttatgttcctccacttatttaaaaatggccaaaaccgccttcaaggaactcttacaaatgacctttgtgacattagttagcctgttattccaggaaaaagaattaaagaagaaatctaaaaattatgttttaatctaaatatctgttgatagtgactcgtaggttctgcaggctgactgtattgggtgttgttctaagcaggtggcttggaatgtgtccctgggaggtaagggggccttccaactgccaagtatctcccttacctgctgcactttaagtcccatttggcttaacgtggcttaacgtgttttaattattttttattacgatgaaacatgcaaaatataatatttaatattttaaccattttacattttttaaattataaaatgcacataaaatctgccatttcaactatttttaagtgtaccattcagtgacattagtgatacttacggtgtggtacaatcatcactactacgtatttccaaaacttttccatcaccccaaacagcagctctgtgtctataaaatggtaactctccattctgcctctctcagccactgatggtgcctaatccactttctgtctctgaattttcccccactgggcaccttatattaagtggaaccggcaagagttgtccttttgtgaatggctcattttacttggcacaatgtcttcagtattatagcacttctcttcatgactggataatactccattttgtttattattcacctgttcatggatacatggattatcctacctcctagcaattctgagtgatgctgctgtgaacattggcttgctatacctgttccagtcactgctttcagctcttctgagtgtagacctaggaatggtcattttaaccattttggagtgaaaaattcaagtgcattcagtgttgtgcaactgtcactaattccagaatattcatatcttcctagaaagaagcctcttgccgttaagctgtgactggtactcccttttcccccagcccttggcagccacaaatccactttctgtctctatgcatttgcttgttcaatggagtcatacaatatgtggcctttatgaatactcttttcttcttttactttgagtgagcttcagtggtatgaatattcttttttttttccttctttttttttgagacggaatatcactctatagcccaggctggagtgcagtagtgtgatttcagctcactacaacctctgcctcccaggttcaagtgattctcctgcctcagcctcccaagtagctgggactacaggcacgcaccaccgcacccggctaatttttgtatttttagtagagacagagtttcaccgtgttggtcaggctggtctcaaactcctgacctcataatctgcccrcctcggtctctcaaagtgctgggattacaggcgtgagccaccacacccggccaaatattctttttaaaacacctgtttattatcaaaattttcagcctatgcaaatgtagaaagaattgccatatgagccccacgtgcccatcacccagatccagccacgaccaatgtctcgtgagttttgttaatcaaaatctgtttyctagggaagaaaagaaatacgtgaaccgattctggaaagaaatccacgtgggagactttgtgcgtcttcgctgcaacgaaatcttccctgcggacattctgctgctctcctccagtgaccccgacgggctatgccacatcgagaccgccaacctggatggagagaccaacctgaagcggcggcaggtggtccgcggcttctcggagcttgtaagtgacccacgtttccagggcctygcaggcattacagccacacagtgtccccatgacagccttctggggctcagagcacctgcattttcctgtctgtcagaccaggctgtttttcctagtagacgagtctgagggtctgagaggacccctgacctacctgagcccatgacccgcctgtgactgtgggaagcaggattcagtttctctgactctgatttcttttgtgcatgtctaagtttcgcagaatgttatttgttcctgtaaagttacaaggaacatttatgagcagctgatggtcaacacgtacctagctgtttcactggtttactaaatggcaacgcagcaggagtcatggcctgttcccaccaggatgctcaggaacattttctcctcaagggtgtttgggttcagcgcgaggtcttcgtagctgaatcctgcctctggtgtgccctggccaccgtgcagcagggtgaggggtgagaggctggagggaagcacgtgtgacagctgcacacaccgactccattgggctgcccaacatctgtccctgctccagggagaaagggccccacccgccaggtctgtgccgggagtgtgaggtgctaatgccaggtgaactgacaggggcaggagccctcagagatcaggaagaccctacaaggaaatgggcctggcccgagccttctcctcccaagcctccttctcccagccctgctctggcctagacagcargtctgagtcggcctgccctgaagggtggggaagccggcctctggttcacagggaggatgccactgggcttttcctcctctatcagacagtgccctcccccatcggcctcggcaccagcccatcgggcttccctggggcagtgggctctgctgtctgwggacctcagcgagggcactgtagggagtggggcggtgagcgattggctgggcagggttgtggggggctctagcatccctgtctccgctctagatgcccccggtcaccgtcacagggggagatgcctgacacacttgcagcaggccaggtactccgcacctcgcccgcccggcctgcctgcggcaggcgtctgcctgactgttccaaccgggctgatttccgccatgatttcctcatttactctgtgtgtgtgtgtgtgtgtgtgtgtgtgtgtgtgttttaaccttcttttatgccaagtgtatttttgtgagctgcctcaaatctttttggaataaggcaaagcagacataaaaattaaaaatagtattttttgttgttgttaatggagtgctctcatttagatcaggagagctggtgaaagagttaggggcccctcgaggcacagcctggcggcgcccagcttctccatgactgtgctccagggtttggtgataggtgtgggccccatccgatgccaccccctcgccccaggccctcgtgcccaccccccacccccggctctcttcaggaagtcaggggcgtgagcccgtctcactctcagcttctcccctaggcctggccccgtctcctctgcagggatgtgaactaacactgacatcagccagggacagcatcccctctcagttcccggggtctcagctagagttaggggcaggcagagggctgatagctcgaatgtcacctctgagaggagcagcctgtgcacacagagggtgagtgccacttaaacaaatgcagatgagtatctactggtgaaacctcagacaaggtggaaaatacagcagaatttaagcactggagggtggagcatgcacacttggcatggcaggtaggggaacgccgcagatagatctccttgatcaactctcaagaataacttcctctactgggcatggtggcgcatgcctgtaatcccagcactttgggaggccgaggcgggtggatcacttgaggtcagtaattcgagaccatcctggccaacatggtgaaaccccatctctactaaaaatacaaaaattagctgggcgtggtggcgcatgcctgtagtctcagctactcgggaggctgaggcaggagaatcgcttgaacccgggaggcagaggttgtagtgagccgagatcacaccactgcactccagcctgggtgacagagcgagactccatctcaaaaaaaataaagaagaacttccccatttcctatcttctgatcttcaacttctgaacccagtcgtatctacagtcctctcccgcccactttttacccaaacaataactgcagcacttcatagctcggtggtgctttatataaatgagctgcttacaagttagatgtttgaaactcgaggacggctgcagaccaacacatctacgtcacccttctcagggccccaggaatgctgaggaagtagctttgagccatgatctggtcaaaatggccaaactaacagcctaaacaattctgagggtttttaaaaaattgttttattagcaccaaaattctttacctgcatgcacattctggtcccaattacctttttcccccgactttctgggtttttttttttctctttccctaaaggtccaaagacatttttttggtatccaaattcccatttatgcattatattctgaaatctatgaaccaccccactgaaartaaaggaagcaagtctcttgacttttaaaccccagcaattgaaaaaccacaaatgccaagaacatttaagtactctgtgtttcaattagtttttttgtaatactgagttagcttgtctcagacaggttaagaactggtaataatctgtacactgacttatgtgaaatacaatataatattttaccagtttaatgaatgatcagttggaagtgggagcccctttgcaaatcacttaaattagaagtgatttgcaacgcttaggttaaggagaagagcgggctgtgtcattaatgcaggaacttagggtatccagcggggtccagtcaggagacagaaaccacacatgattcaatcagagaaagtctgatgtgaagaattcttagttggggattgggttataagaagtaatgatatgtgaattatatctcaataaagctgttatctttaaaaaaataaataaaaaagaaataaagaggaccctgaagaatataggagccaggaacagtggctcacgcccataatcccagcactttgggaggctgagacaggaggattgtttgaggccaggaattccagaccagcctgggcaacacagagaaaccccatctcaaaaaaaaaaaaagaaagaaagaaaaaaaattgccagatatcgtggtgtgcagctgtggtcctagctgctcaagggattgaatgggaaggatggtttgaaccagaagtttgaggttgtggtgagctgtgatcatgccactgcactccagcctgggggacagagaccctatctctgtctccaatatatatatatgggaatagctgatgaagggacagccactgcccctggctctgagacagagttctcccactcagggaagagtaccctcccaacccctgaaccatggcagggggcacagccttaaatttggggatggcaggaaaggtacttaggggctgtactggtggaacttgctagaagccttcccttggggaccggggaggctattgccagggaggtgccaagcataagaacttgctagatgccaggagcagttgctggacgctgctggagccaggccctcgctgcagtggatgaagactggtgacagctctctagacagcagcgccgtggagccccacctttgagagggtgcatggagcagcagcctgggcttgagagggcccatgttgcctgcaggaatatgtccagggtaccccggactgagagatggggaaagtgtggagcaggccaagccctggagaaacctggagggagtgggcagtgcggaacgggtacacacacacacacacacacamgcacgtatgcacacacacgcatgcacacacacacacaccccacstaaagaccagccatgggaccaatacgtggaggactcaggcctattcaccagtgatgcccagtatggagcagtgagatgagtccagggggcttttgttaggggtttggggccatgagaggtcaagggaggttccagaaagaggagcttgaaactgactctgaaggccaggatggagaggtctcaggtgccaggcactacagggaatgacgtccgtcagatggtgccccagaggcggaatagggttgtatttaatgaagagcatttgaaaaagtgcgcagtgttgaggggctacaacaaaaaccggaaggcggtgggcatggcccacccagaccccagaatctgaaggcgaggcctagacaccgggctgatggctccgggaccttaaatcacccagctatttcacttctggcaaaagaaacagagatcttgagacgtaaagatttgatgtaagagttggagttgaatggatgttatccaagaattgagagaggcccccgtgtggagcatcacactgtcaggcaatgtctcacatttgttcagcctcctgcacgccaggcctactgtatctcccacaactgtagtagagcaaacatttttaaacacaatttcacagaattttaagtataaatcttgtgagataatgattatcacaccattttatagatgagaaacagaaaaagtgaagtcaggagattctcccaaggtgcctcccctcccccaccccatccgtcagtgtggattcggagcgggttcctccactttgcgtggggtgtctgctgtctctcacctgcacattcgtgcagccctgccacgaaggtgcatacgttcagatgttctgtgggtagcagtttctagttcatttgtaacatttgtcatttctgcagaactaggagatccctagactgataattttatataaaactcagtgttttcaaagactcatttttgtaagttttaattcattcagcagatacgtactgagcatttattatgtttctaacgccattctaggaggtgcattgatcaaaactggggaacatctttcctgccatagtgcttacatgatctatgtgaaaagttggatagacggttgaagtcttcggtgctaactgtagacgagaaagcagaaacagggatatgaaatgtcagatgagtgttggaatttcagccggggtgaggcggggacagggctgtcctgcttgagaacagctggagagtccagacccagaggacacgtcagtgtcgggaagagccgtcccagaggtgacttctgtgtgggttaatttactgagaaaatagtttccaacagtttgtctcttgggtggacctgtttggatgagtgcccacaatcccagccacacccacgtcctctgtgcagcgctgtggggagtagtcattgtcaggcttgcaggaagatctgctgctgactcttcccaggcgtgtgcacatgtgtgcacgtgtgtgtgtgcacagtggtgcgtgttccaaataaggaagaaagataaaaggagtatggaaacttcctaggctggacaaacactgctcttaaacacgtaccttcacagtcaggtcagcagtgatgccaaggcggagacagggtttcccctctgttttgtgaatacactgtgaccagtccctggggggcctggtgtattcaggctctgactcagcacggttttctttacaaaggagagtcagtcccaccccaagttacttgacagaattcagaagcttagaaagtgacttcaaaagtccaaatatgtagaagacaaaatattttttttaaaaaactgctacctacacatgcttccaaaattgtctctatcacaggaaaactagaagtgaaaaagtataatttgcaaggtagtttttgtacccaagtctctttttccctaagcttttcaagttgttagtctttaatgaaatttagctacattggccgtggaattgaaggaggcagcataatctatcatctaagtggaaaataaagacagctgcctgggtatggtaattagatcggtcagttttaagcctttacaaagaggcttccatgtttttctcttatacattcaaggatagtcaacaagctcataatttatactgagacatttttgtttttaaatttaacaatctcataattttcttgaaggacattaaatctgtaacaggaaagacagaaataaatgactttgacaatacaataactttatttagattaaatttttaattctaacaagtgtggatattcatagaaattcagttckgtaggtaatatgattatttgagacataccatgttttttcatattaactgtgtttatttcatggcaatataagtttggcccgaagaagattttttttttaaattctggtgacttcataatggattctttgcctttaatttatagtctattaaatcaccatgtacagagagtgcagcaccagcactctgatcttttttttttttttttctttttgagacggagttttgctcttgttgcccaggctggagtgcaatggcactatctcggctcactgcaacctctctgcctcccgggttcaagtgattctcctgcctcagcctcccaagtagctgggattacaggcatgtgccaccactcccggctaattttgtatttttagtagagacggggtttctccgtcttggtcaggctggtcttgaactctggacctcaggtgatccactcatcttggcctcccaaagtgctggcattaccagtgtgagctaccgcacccgaacctctgatctaaatgaataaattaatgccatgaagttgataataatttggctagtctgaaatatttatccaaaaagatcttcttatattgtgtggaaacttaaaattttttgtgtggttggaaatgatcatttcttattccagaagtaaaaagacagccaaagcagtaagatgttttaattctgttcaaggtagcgtacaatgtgaaatgctttttttctctttaactatattttcactgtttaaaaaaaaaaacgggaatttaataaaatttccaattttcctaaatgtagtttaattgcatcagcagttgcaaagggtttgaaacttcctctgtgtgtatgtgtgtttctggagcagggatttccttaccagtaggaagaggtgacaatgtgagatcgacgcagttaacactaggcatctcctcatgagtgagtgaatatgtgtgtgtgtgtgtgtgtgtgtgtgtgtgtgtggatgtttaggtgtgtatgtttgtgtgagtgtgtatgcagacaggtgtgagtgcaaacatttttgcaagtgagtgtgcaagtaagtgtatgttccaaagaagaaagcaaaatgaagtgatattgctttattaggttgtcactttctattatctctaaatttaggagaggataaatgttccctcctgggctaagatatagtgttgcagaagtggattgctctgcaagagagtgctccctaggggaatctggagtttccaatctcactattgaggacctgctgtgagcccatgcattacgtgaggggtgcccacgcaatccacttctgctgattggactctggaacctttgtcccttggtggaggccctgtgctgtgtgtcatttcccttctgcttgttttgtgagcacagctttcaacaagagggaacttccttgtgtccacagagcacaatgcaagacctgtcagagcacctccgcagacattggagttatcttaattttgtgaattggtaagagccagcttccctcgttcaacctatgcaatgctttcggtttgcgagtgctcctcaagtggaaggctgtattttggttctcactgtggtattagggcttccttagagtttcgcccgtctacagcagcagagatccatgaacacatttgcagtttcatatagtcacataaaccagaccttataaaggaatcgacctttaaggaaagcaagaactcgacttcagraaacactattgcctactgggatgtggatgaaactgggcttcctgacatctcagttgggtttagtgtcgaaattaattcagggctttttcaccattgctaatgaataatccgtgtgccaaggaaatgacttcgtgaaccccagtgagacttttaaccaagctgagatcaggcctgcaaacttcttcaatttgtcagttttcacaaagcccttttcagtagtgtgtctgtcagaaggccttatgttccccgcctcccaaaactgtaaaaggacaagaaatgtgagtgtcattgctggccacgctgtcttccctggggttccggagagtgggggattgggtgcatgccggggtgttcataggttaggaattgtgccagatcttcagggtcgttccactcacctgtcacaactgacctttgccgcactggcaccagcccttggcgagaaacaagccctttcatttgtgtggtaaagaaggccaacttcaaagcattatggatgtaggtttgttttggacaaaacttcaaatagctggtttgctcatccggcctttatcaagcattctggattcttgaccaccagacaggaaattctgcgaggacagactctgaggttgacatctccatctcggcccagtgagcctgcgtgggccacggaaacccctctcggggattttgagtgttgttttaargctaaaagtgggcagggaaaggttttgggtgcaaagtcrggttctgaagctgagatcagactgccgcaagcatcagagacgtcagggcctggtgggtgggtgggggacgttcggaggagagagccctaccttttctgcaaatctcctatggaccagagattcagccacagcccagaacctggaattggggtggctctgagtcagtgttcagaaagctagtaacccttgatgactgaaatgagtgactgaggcagaagtatcaatcaattgaggtttgttaagccagctttaggatgtgtcccggtaaaataggaatcacagactgatttctgaagaggttttcaggccgggcgcgatggctcacacctgtcatcccagcactttgggaggctgaggcaggtggatcacctgagatcaggagttcaagaccagcctggcccacatggtgaaaccccgtctctactaaaatacaaaaattatccaggcgtggtggtgggcgcctgtaattccagctccttgggaggctgaggcaggagaatagcttgaatccaggaggcagaggtggttgcagtgagccgagatcatgccactgcactccagcctgggtaacagagtaagactctgtctcaaaaaaaaaaaaaaggtggctttcaggaggtgtagtattcatacatttccttaaaggaggaggaggcacacaggaagaggggcaggtaggcagccagggaatggtcactttcctgtgagacttcagttggtgtccagtaaatccacatttttacatcagacaaagtcaatgtgtgaagagaaaaagcacagagtcaattatgcagacatctctgggtgggtggagggaggagtcttgtctttgttctgtasctgggaagataagcctctagtggacattattaatgtggaatccaacagactttagttttagaagctagacttagatcgcagacctaatgtttttctttttattttttatagagataggaaggtctcactatgttgctcaggtttctcttgaactcctgggctcaagcagtcctcctacattagcctctcaaagtgctgagattataggcgtgagctgccgtgccgggctctttgtgttatgattggcatgtccttgtttatgggtggccagcaaacaatgtcctcatgagtgatcccggggggcatgttgtgctgcacccctgttaacckcagtggggaaggcacaagtccaagaggccgaagaagagacccagagccagcacttgcaacacggggtttgattaggggcttacacagaggggagagagtctggtggtggcgggctgaaaaggaaaaccactaccgcttataaacagcatgcactttctacagcattttcacttaacaccctcccctgaacgacctctacctggaagccttcatttaacccaaaattcagggcctcaatcccctgtgcgrcccgagttccacaggacrggtgggagctcagatgtttatcatagacaaagaasaaatctctgggttggccacgcccagatgtcctagctcagcacacatactcaggcacatctgccatgcagagtcatcctcagggcaggcttgaggtattgctgtcaggtgcatttgccctgcagggcagccctgcagagatgctgtaggcctcttgcctgtccctggggcgttggatgatgagtaatgccagtgagagcggttcatctggaacagggtgttgcctggctccacctctgggcctaagtttgggggtcctgagatttattattttcctttgcaaccctctggtgagagtgactacccccactactcccttctcctggctgggtaacagtgccatctgacactgggcacttgcctgtgtgaggccctcattcatttagttctcttggcagctctgagaaggtgctgttattactcccatttagcaaaggagccactgagactcagagggagtcagccccttggcctgctggggtccaagtgagtggtgggccaggttctgggccaacagttggggcgcagggcctggccgtgaagcccctcagggccatctctgcagagcagcgtcaccattgctgtcgctgctcaggctgattgggctgggctgggccgatccccaactgtggtcaagtctggaatggctgaaaacatgggtggggcccctccccacctcgcccgggtcgtgttgtgatggctgaaaacatgggtggggcccctcccccacctcgcccgggtcgtgttttaaatgctcacctcgtagttggcttgggctgccataacaaggtgccatgaattgggcggcttaaactgcagaaatttattttctcacagttctggagtctggaagtctgagatcaaggtgccgacagagttggtttacttgaggcctctctcctgggcttgcaggtggtcgtccctctgtgtatgtctgtgttctgatctcttctttaaggacaccagtcctgttggatcagggtccatctcagtcacctcatttaacccttattacctctttaaaaactgtcttcaaataagggcacagtctgaggtatccagggttaggatttgaacgcatgaatctggggaaggtagaattcaacccctcacagtgcaggttcggagtgaaagtaaccgccattcctggatggtggcatcaccatgctgatcacctcagatcaatccatttcactgcatcccaattctctccactgtcaggaagaggaaatgctttctcatgatgaacctacagctagaaactgcagttccagaaagttagctgaaggctgaggcacccgggtaggatggccacttccccggctggctgcagtgttctaggaagctgatggttatggttagtatatgcatgtcttttttttttttttttttttttttgagacagagtctccctctgtcacccaggctggagtgcagtggtgccatctcggctcactgtaacctccgcccccccaggttcaagcaattctctgcctcagcctcccgagtagctgggattacagacgcccgccaccacccccggctaatttttttgtatttttagtagagacagggtttcaccatgttggccagggtggtcttgaactcctgacctcatgatccatccgcctcagcctcccaaagtgctgggattacaggygtaagccaccatgcccagcctatatgcatgtaaaagtaaaagctctgtggataacagtggatcaaaaggaattaggattttactatggggcagacttcgaaaatctgattagagtgtgtttcagtattggagcgcgtgtgcatgcatgtgyrtgtgagagtcaaggcactaataagcaatgtcaggacagaaattctattaaacatttcccttagaaatagtgagggaaaacctttcaacccttaactaaactctcctttaaaagttcttagcatttccttcaaggaagacataatttctacggaagcaatacgtagtgtttttcctgttccctgcttgtttaacattataaaagtaatccagacttgttttacaccagtagtgaaaagagggctctaccaggcatggtggtttacacctggaatcccagcactttgggaggccaaggtgggagggccacataaacccaggagtttgagaccaacctgagcaacaaattgagaccctattgctaccaaaaaaaaaaaaaaaaaaaaaaattagcccagctacttgggcaggtgaggtgggaggattgcttgagcctgggaagttaaggttgcagtaagcctagattgtgccattgcaccccagcctgaatgacagagtgataccctgtctcaaaagaaaaaaaaaaaaaaagagagagagagctctgctgagagtcaattagaaattggaaacacaaggcgggacctggacctggacctgggtctggggttgaagcacttggggtggacaggatgggagtccaggtgcccagccaggagctttgcctctcagtccacacttgcaagtagaaggaatcaggaagcactgcttttcttttaaacagacaatgccattttttctcagattacatctttcacagaaagtccacagtaatgactgtgagccacagtgacaggagcagtggcccaggagcccctgccgctcaccagcccacagctctggaggcccaagccactgaccctccctccatcgcagctgctcgcgtgctgtgtcctgtgaagggtccagcggtttcctcgtcatgccggcccagcacttggggttccctctgacctggctgtccctcatccagtgcagagaaccagctgccaagtcctgtagattctgcacgtgcaagtccaggaaccagcctcacaggggtgaggggactttgggagccagccctggtgcgcccgttggacccccttggccccatgttcaccccagtgtctcccaggtcagggatgcccagtgcctgcccatgcacccatccaggttggcatgttagatgcgtctcagacagagggcccgcaagggtcccatactccagtgagcacacctacctctgtctacagcacagtacttcagcgaggtgacagcggctgggtccttgctcactgcagtggctgcagagaacatctgccagcacttagcacaggcagctagcacgcattagtttttagcctcttagtgtctcattggccgaggtgggattcccctgaggagctttagaagtcccaaaggcctgggctcacccctgcattctgactcccctcatgtggggtgggccaggcactggggtgctccaggctcttctgcactaagaaccaccacgctgagataagtacagttgcttccctattttacaaataaagggatccaggtctggacaggtcaatgggctcaccctactatgcagccagtcagaggaggggctgtgctgcaaacccaacattgggctccagatcctgttcttacagcactccccaaccccatgcctctctgcctgagcccyggttcatccaggtctcccagcagactcgctgtccgggatgtggcgcagcctccatccatcctctgcttcctggtgacagcagccttgcatggcacccccttcaccgtctcaggggtgccacagcrtgtccacccatctcctctctgcaggaagccctacgttctgctgcagcacctgccagaatgatgcaccaaaattgcagttctaaccttggcactctcaggctgaaaggcctgcagcggtgagtgtcacctgtgaataccatgrtaaagttagggaatggctctctagaccagaacaggcagaagggaatttgattgctgcccacacatctgactgtaatgtgctaygtagcggagcagccctcttcaaagaaattgctgatgccaagaaaccaggcagggcaaagtgtgtgtatgtgtatatgtctgcctgtgaatgtccatgtattaagttatatggggcccattaaagkttttttttttttttttttagaaacagttccactagtttaaagtatggacaaaaccccgattagagtatttttcgggagttttttgggactggtgccttctcaagctgcagctctagtccccgtggcacctagctgtgttctaggatgttttgctgaggcccgaggagcgcttgcaggcggcacagacactgagctcagggtgctgggatggaagcggctgggttggggcctggaggcagtgtttgagcgtgtggttcctcagtgcatgtaagcaccacctggccctttcttgtcaccgagaactgccagcaggaagatccaattacaatagaggctggtggagcttcctgccctcctcacttcttctgctggctcagagggaagccctatttcaggaggggtgtgggctgctgggctgggcctggggagggagatgctggtggagcatttgggggcttgaggatgttgggtctgagggcctgaccacagcacagtgagacacttgattatacaggcaggctacagcatggcatggagagtgagctttggggtctgcctcctacatttgctagcttgtaatccaagaacatcatttgacctctctgggcctcagtttcagtatctgctgatatggtttgtccccacccaaatctcaacttgaattgtatctcccggaattcccacatgttgtgggaaccagggggaggtaactgaatcatggagtctggtctttcttgtgctattctcgtgacagtgaataagtctcactagacctgatgggtttatgaggggtttccacttttgtttcttcctaatttttgtcttgccgccaccatgtaagaagtgcctttcaccttgcaccatgactctgaagcctccccagctatgtggaactgtaagtccaattaaatctctttttgttcccagttttgggtatgtctttattagcaatgtgaaaacggactgatacatctgcaaaatgggaatgatgtcagaggtccttctggcctgtcctttgcactgcacctggcaggtggtgagtgctcagaagggtggctgccctcagcactgccctgctgctgctgtcattgaaaggcaggctrctggaggaaaggtgagaccrgcaccaggagtgaagttatagagaaaagggtttgcgtctctgtgagaagaacttgatcatgaatacaatacckctgtctaatccacagagctggaagaattaaggtgaggctggagagtttgggtattagatgagaattggctgtccagggctgggagcttccagcccgagctctgggaaggaggaagctgcgtctcaatgatcttttccttgcccaggacttcaggagtgaccgcttacctgcacataagagcaggacagctgtagtgccgcggtgagggatgtgatatcattagaggctctacacgggcagaattctggaatgtgggtgggaacgctaagtctctgactttaacctgagctttcttggtgccagaaaaccagagcaagttggacacgctgaatgttctggagggcttctgagatatcaaaggcaggagcaggtagacgtgtttctaatggaaagttctgatgctgaaggggaattctttgttcacatgttgtcattattggcaggtattctatagaggagtggagaatattggattactatgctactggctgttaaacattgtctctccacgaagccaccaggctgtgccaggcagacacaacacccccgccccgccccmctgtgttgtgctgacttcatcatgagggctccacagggctkctggtgctccccagagatccttcacctgaaacatcagggctgtttaaagtctaggcttcaaggagaaaatcgtctagaagcaagtcttgatgctgtttaatgtgtgtcctgcatcctcactagcattccacagacaaacgcttcagccgggaggtttaatagaatgaagtgcatttccttacctttccctgcagtctcaggtccccagtggcactcatttcctgaacccagtcatggaagccacaattaccctctgccattagcaggccggagcttttagctcatggcactcctaaacccgaaggtagagcgtctgcggtttctagcatcataggctgagtgataaccctttrtatttcaggtgatgggaagaagtgaaggatagctcagattgttggaaagggaatatcttggtctgttcctaatactgtaatgaaatgaccacagactgggtcacgtataaataatagacatttatttctgacagttctggaagctgggaatacaagattgaggcgccagtagatctggcgtctggcaagggccctcttcccggcctgcagacagccaccttcactctgtgtcctcacatggtggagagagagagagaggcagaacttcgagtgagtgtctcttcttagaagggcactaatcccactcgtgaggctccaccctcatgccctaatcacctcccaaggacccaccttcaaataccatcaaattaaggactaggttttaacatatacatgggggactcaaacacatacattctaagggctaagttttaacatatacattttgggggactcaaacctgccatctgtagcagggaacatcctgagtcctggaagcccgcgctgcacggtgcaccttaggttggaaagctctttgcccaggattcytcattttcgtaagtctttgtcgggtcagtggaataacagcatcagcctcactcggtgccttgaagaaatgcagagtcccaggccctgcccagatccactgaggcaaggatctgcattttgacaagatsctrggggattcatgtgcccattggagactgagaagccctgcattgcatgggtgtcacctggacataatgaggcatattcttctctaattgttgtccttggttttgcatgcaagtgggataatccgcttctgtgatcttgctttcctgacatagttgatattttcatacttcactaatcaagcacttaaaagaagacacagagaggttatcttttacaaaaaaatgtacttttgaaaagctctaaataaaataaaatgaaacggtgttctcctatagatataattttagggatgctttatttccattgcttattgattgatccacaggggaggagcttatagctggccagctctcatctgcaaagtagttaattattaacagcacttatttgcactgatcctgtgcttcctggagtgaatcattttacagcaggtgctgcagaatcagtgtcttgctgtgtcctggtcttcattaatctgcagcctgtgttcctccagcttttccaaataatgacagaggacagacattcacagaaacaatctttaatccgggcaccctgtggcccactcaagttgacacatgaaattaacactcatgtgcgtggaagcctctcagaggcatccttctgggagcccagtgctggaagggatgctggagagccaacttcaccaggaggaagtgagtctggatgcagggggaggagcctggccatctgctgtcgtttgggatgagtcggactcactggttgctgatattcaagaccaacagatgagcggatgttaaattagtgatctagaattaaaaggatgccyagtcccagtgaaaataatttatttcaagaattccatgggcaagcaatttaggcacgtaaaataacacccttattctcagcaggttaattttgctygagaatgaattgagtgcaggtggaggagcaattattttcttacaaaaataagcttccctttccctaagttgaaaatagccttggataagtcagatgacagtagtttcttaaagacaggcagttcattaactggttgtttttagctgctcagtaagagtctttcaaaaaaccaaaagtttgggaaaatgtgtgtcacttgaaaaaaaaacattgttaattatcggttgaaaactttagctgccctttcrttttttaaacagccttattgaggtctgactgacataaaataaaccacacatatttaaaatgtataatttggccaggctcatgcctgtaatcccaaagttttgggaggccgaggtgggaggatcacttgaggccaggagttggagaccagcctgggcaacgtagcaaaaccttgtctctacagaaaatttacaacttagctgggcatggtgccacacgccaattcctagctggttaggaggctgaggctggaggatccctggagcccaagagttctagtttgcagtgagctatgattgtgctgctacacactagcccaggcaatagagtgagaccctgtctctaaaataataaataaataggcttgggcacagtgactcatgcctgtaattctagcactttgggaggccaagacgggaggatcacgtgagcccaggagtttgagaccagccttagcaacacagtgagacacagtctctacaaacatttttctttcgaatttgccgggcgtggtggtgcattcctgtagtcccacctactcgggaggctgaggcagaaagatttcttgaggccagaagatcaaggctgcagtgagccatgattgtgccactgcgttcctgtattagtctactctcagactgctaataaaaacatacccaagactgggtaatttataaaggaaagaggtttaactgactcacagtttggcatggccggggaggcctcttgaaacttataatcatggctgaaggggaagtaaacatgtcattctttatatggttgacaggaaggagaagtgccgagcaaaagggggaaaaggcccttataagaccatcagatctcatgagaactcactgtcacgagaacagcatggggggaaccgacccctgagtcatttacctcccaccggatccctcccacaacatgtggggactacgggagccacaattcaagatgagattttggtagagacacagccaaaccatatcattccaccctacccaaatctcacgtcctcacatttcaaaacacagccatgcctttccaacagtcccccaaagtcttaattcattccagcattaacccaaaagtccaagtccgaagtctcatttgagacaaagcaagtcccttctgcctatgagactatraaatcaaaagcaaattagttacctcctagatacaatggggkaacaggcactgggtaaatatagccattccaaatgggagaggttggctaaaacaaaggggctacaggccccatgcaagtccaaaatccatagggcagtcattaaatcttaaagctccaaaatgatctcctttgactccatgtctcacatctaggtcacactgatgccagaggtgggctgccatggccttggatagctccacccttgtggctttgctgggtacagccccactcctggctgctttcacagctggcgttgagtgtctgtggcttttccaggcacttagtgcaagctgtccgtggatcgaccattctggggtctggaggacggtggccctcttctcacagctccactaggtgctgcccctgtggggactctgtggtaagtgtgagtcaattaactctctttcctttataaattacccagtctcgggtatgtctttattagcagtgtgagaacagactcatacagtaaattggtactgagagtggccccggacaaccactgatcttctttcagtcactgcagattattttgaatttttaagagatagaaatggaataatacagtgtgtccttttttcgtctgacttttttctctcagtataaatattttgagatttatccaagttgtaggtattcatagtttatttctttttattgagagtagtatttggttgagatatatagtatagctcaactatgtatcttttggattcattcatctgttgatagacatttgggttgtttacaatttttggttgtgatacataaatgtgctataaaaattcatataaaagtctttgcaaagacttagtctttcattctcttagacacatctcttagataaatccagaggtggaatggctgaaacatatggtaggcacatgttttatatatgtatgcttgtatgtatgtatgtatgtttcagtcaccaggccggagtgcagtggcacgatcatagctcactgcagcctcaagctcctgtgttcaagccatcctcctgcctcagtctcccaaagtgctgacattacattcatgagccaccgtgcccagctccatgtaattaattcctgctgtgaacttgcttagcacaagcccatcagttttgtgctattatagttttggaaattcagtccaatgctatgaactcaaaattattagaaactatatacttgtcagagtttttttcattctttccattctttccatgaactgccctgaagacataacacttgamgattgtaagtgcttgcaagtaactttcagaaaggcattggaataaagcaattgctatgaacaccaaggcttaaaatggctatggcaatgcagttgacaaggaaatttggttattcgtgaaccataattatgactgatagcatttatatgaagacataggtttctaggaactttatacaattttggaacatctattaataacacatccatataactgtcactcgaaggctaaacatcattccatgttttgacagtgcttcccatataatttaaaatattcgataagcccatgttggcttaatctctttgttttacagttccttttagaagttccagggctttctggaatgtcctaaagttaatttcggtcaaaagttttttgaaaagtttgtcaaatatccaaggtttaaattacatagctactcagggaggctgaggcaggagaattgcttgaacccaggnnnnnnnnnnnnnnnnnnnnaaaaaaaaaaaattacatgatcagataggaacacagatcactgtgaaataaaaccaaagtgacagaagatttcaaagatacaaagcacaagaaattatcttgattaaacatagaatcagtttcctaggccagctacctaaaaggtaaagaaaaacttttcactattttttttttttttttgagacagggtctccacccaggctggagtacagtagtgtgatctcagctcactgccacctccacctcccaggctcaagcgattctccaccttagcctcctgaataggtgggactacaggcatgtgccaccatgctcgactaattttcttaaaaactttgtgtagacataggaactcaccatattgcccaggctgatctcgaactcttggtctcaagcaatccgcccaccttggcctccagaagtgctgggattacaggcctgagccaccacacctggcccacagttttctattaagggcagagcaatgctccaagaaaaccttgttctaacacagaggctcaaactcctccctcccatcagtgtacttttcatactaatgctcagttttttaaaaacttaaattttctaattttagtcaatctgatcacacataaaattattttcatgagattaatcttgcacaaacctacatcttgcttaaaccttccattttgtcctatgccttctacctgaggataaaaatttacttgccttttccctttatcattttgttatatatattgttatatataaagttttggtgccacaaaagaaatagcactcgaatataaaatgttccttttaattctcagcaaggcaagttacttctatatagaagggtgcgcccttacagatggaacaatggcgagtgcacatttggacaaaggaggggaaggggttcttatccctgacgcacgtggcccctggtgctgtgtcggtcccccattggctagggttagatcgcacaggctaaactacttccaatgggctaatttaaagagaatgacagggtaagtgctttggcgggagtcaggggagagcagatagcaggtgatcagaatgagttagggtggagcaggtgatcagaatgagtaagggtggagcaggtggtcggaatgagggtggagcaggtgatcggaatgagttagggtggagcaggtggtcggaatgagttagggtggagcaggtggtcggaatgagttagggtggagcaggtggtcggaatgagttagggtggagcaggtggtcggaatgagttagggtggagcaggtggtcggaatgagttagggtggagcaggtggtcggaatgagttagggtggagcaggtggtcggaatgagttagggtggagcaggtgatcggaatgagttagggtggagcaggtgrtcggaatgagttagggtggagcaggtggtcggaatgagttagggtggagcaggtggtcggaatgagttagggtggagcaggtgrtcggaatgagttagggtggagcaggtggtcggaatgagttagggtggagcaggtgrtmggaatgagttagggtggagcaggtggtcggaatgagttagggtggagcaggtggtcggaatgagttagggtggagcaggtgatcaaaaaaggttgctttacgaggaagttaagtttagaagtagaaggcaaagaattgaacatactgacattaattctttgaaaagaaatttagaactcatatctaacaattttgaccacacaaagttatctctcatgcaaaagaaagaaattactctttttcaactttttaattttttaccaaaaacaaatcctcatacttacaccttttttctcatctctcctatttactgctcctttctgccttttttctatttcctccttaaatctatattttgaagaaaacctctaaataacctttgaattagatagaattgctcttttttaacataaaatatatccttctatcttctcaagatttttctcaccaaaaacacatcttactttctttgtacattttgcatacaaaattgttttccttttctctagtagttctaattagctatattaattagaattttaacctttattttttgtgaaaagctaggaaatatgcaatttttatttgtcacttaccaatattttatggatttaaattttataattactagaaacatgtaacttcctcacagaacaattgttttatgtttactaacagacccaaatatatttagctactctctaccatataaaaacaagatgtcaaagtatataaactttttacttattgttaatgatgaatgcttagtattttaacttatcaagaaatgacctaaacatttaatgagtatctattacttaatttcacttgaaggttttaagttaccaaaaagattttttgaactatgaagaattcatttataaatgtttatggccgtttgaatgtacctaatttactcattttaacagttatatttgagctgtttatgaacattttatttgacattgagctaaactagccatcatctcaagttttccctgtgaaccatttttacaacatgcaaatgttagtcagcacctaagcaaaaaccctaaagttaaatacacaggtattttgctgatgagaagacccaactgttttcattaaaccagcaacattaaaccagttttgtttaccaaagatttacccaggtaatgtggatcaaaagtcatttgagttgttctgtttctttcagatagaatgtttgatttaagcactcagttttctttctttctttctttcttttttttatttgagacggagtcttgctctgtggcccaggctggagtgcagtggtaggatctcggctgactgcaagctccgcctcctgggttcacgccattctcctgcctcagtctcccgagtagctgggactacaggtgcccgccaccacacccagctaattttttgtatttttagcagagacgggggtttcaccgtgttagccggggatgatctcaatctcctgannnnnnnnnnnnnnnnnnnnnnnnnnnnnnnnnnnnnnnnnnnnnnnnnnnnnnnnnnnnnnnnnnnnnnnnnnnnnnnnnnnnnnnnnnnnnnnnnnnnnnnnnnnnnnnnnnnnnnnnnnnnnnnnnnnnnnnnnnnnnnnntgcttacctgttccattgtcctaaacaattgctagctaggaaccttaaatttgcagtctcaaagggatggctcccaaatgaaacaaggtaaacaatgaacagaacttagatctagatactattatttgccaaaacaaagaaggggtaaaggcccagttaaggcaagatggccaggaaaagtacattaaagaaaggtaaggtttgttatgtgaaggttgaaccgatgtttttcccaaagcaaaagtttctagtggtttaagtacagagaaggagacacgcttacaaatggagatttcctttatagatgtaaatttcttttacaaagagtttcaaaattagctaactaaatttcagaaaattgtattttaaagacaggtttagttccagagttggacttttcagcttcgtttcttcattagattattgacttagggggtagaggctactaatgaatgggcaaagcatattaggtagaagtctcctgaagcttccctcagaggcccatctgtcctggtggttaacatggagaccattttcagaggttgggcagactgtttttaagggctttcttggaaatctttgagacagccccttttctagtgtcctggttgtttgcacaagtggcaacrattttttggaaactgttgttttcggagtcacctattagaaagtgctccagggcagtcccaaaactgttctgggttgttggttgccatggagctgaaacactttgggaatggctttcaaaagctcatttgtgctgtttcagcattgcctggcccataagyagtccactgagactagtcaggttcctatcattctcaaaaaatagcagtgtgcccctttcattcatttttgggcctccccaggtcccaccaacctgtgtattagttggtggcagtcaggtatccagaggtcatatgttacaattaagaccttgaattctttagaaaactttcgaaggtctttcctaggtttaggaaattttcgaactatggccctgagctctatttctgtctagggagtatcagtcacttggggattatctcctgaatttgtgggtagttcttataaggaaactgtttaactgctatttcaagggaaaaaggcagttcagacagagtgttagcctatgaatattctggagtagatcatgaatattcagacaaagtgggatagggtatggggaatatcttgcatttttagattttcattagctttttataatgaatctttataaaaggctatttgggaatcctgttgtctctttgaggatcctgaatgccaataagaatcccattccctctgcctaatttgtggagcccaggactcaagtgcacttcttcaataaacagttttgttcatctggaacgttttacataatggctgctgtaattccggattatctttagtaagatttttccacttctgtaaatatttgcaggttacagggccaaatatacatgaaaaaggcaggtctgctagaaggcaagtatttagagcttgagaaattagggatccaatttttatgtcggatattgggtttctcagggccgggatgactttacctctgagattgccttgaccaactcagccaatgattttccattttctgtctgacccaggcacccaaggcttctnnnnnnnnnnnnnnnnnnnnacaaacaaaataaaaaaccgcagcacatgaatgcacagtggttcacacctgtcatctcagcactttgggaggccaatgcaggaggattgcttgaggccaacagtttgagaccagcttaggcaacgtggcaagactcccatctctacagcaattttttatcttgtctctacaagaacaaaaaattagctaagtgtggtggtgtgcatttgtagtcatagctatttgggaggctagggtgggagaatcccttgagcccaggaggtcaaggttatagtaagctctgatcacggcagtgcactccagcctgggtgacagagaccctgtctttaaaatatatatatataacatatatcatatatataactatatatgatatatataacatatatgtgattatatagatagaaactgcagccctttatttatgctagccacaggtgggggmcaatgtacacttctgtccagccatattcttgggagcttgactcaaatgttttatggaactaagcacaagaagtcttgaaaaatggagcaaaaattacagcccttaagagtgacttgtgggggggtgcagttaggggtgccttttcctgtgttcctcagggggtctcagggaatcaaccttaagtgtccatcaacagatgaatgaataaagaaaacgtggtatacacacacaatgaaatcttattcagctttaaaaagaaggaaattctgtcatttgcaacaacatggatggagttagacaacattatgttaagtaaaataagccaggcacagaaagacaagtatctcatgtactcacttatatgtggaatgcaaagcaatcatactcagaagctgagagtgaactgtggttacagaggctgggggatgggggagataagaagatagatgatggtcaaagggagcaaaatctcagacaggaggaataaatacatattttttgagttctgttgtacagtgtgctgaatatagttagtaatggaatattatacatttcaaaattacctagagggtaaatttcaaacgttnnnnnnnnnnnnnnnnnnnnnnnnnnnnnnnnnnnnnnnnnnnnnnnnnnnnnnnnnnnnnnnnnnnnnnnnnnnnnnnnnnnnnnnnnnnnnnnnnnnnnnnnnnnnnnnnnnnnnnnnnnnnnnnnnnnnnnnnnnnnnnnnnnnnnnnnnnnnnnnnnnnnnnnnnnnnnnnnnnnnnnnnnnnntttacaacaaaaatcgcaaaataaaataaacaattagagaaaacagcatgtaggaataataaaatacctggaagaaatttaagcaaggaggtgaaagacacatatactgaaaactataaaacgttgctgaaaaaaattttaaaggacttaaataaatgaaaagacatcctatgttcatggataggcaaatttcatagtgttaggatgccatactactcaaagcagtctactgatacaatgcgctatctgtcaaaaccctaatgaatttttgcagaaataaaaaaggcaatcctcaaatttatgtagagttacaaggctccccatatagccaaaacaatcttgaaagagaagaatgaagttggaagattcacatatcttgactccaaaatgtactacaagactacaggaatcaaaacagtgtggtctacctgagatrttgtaccctttgaccatcatctccccatctctcccaactcccagcctctgtaaccacaattccactctctgcttctgagtttggttgctttagattccacatataagtgagtatatgaaatatttgtctctgtgcctggcttattttacttagcaaaatgttgtctagttccatccatgttgttgcaaatgacagaatttccttctttttaaagctgaatagtatttcattgtgtatctataccacattttcttcattcatctgttgatggacacttgggttgattccattattgtaaataatgcttcaatgaacatgggagtgcagacatctctttggcaaactgatttcaaatcttttgcataaatacccagaagtgagatgttggttcatatggtaattctatttttagttttgggggaacctccatayagttttccataacagctgccctaatttatatttccatcaacagcatatgagtgttccctttgttcacatcctcatcaacatttgatatcttttatctttttggtaataactattctgacaggtaggatagcaaatctcattgtggttctaatttgcattttcctaatgactagtgatgttgagcattttttcatatgtcttttggccatttgtatgtcttcttctaagcaatgtttattcagatcccttgcctattctttaatttgattttttgttttcttgttattgggtttttgagctccttgtatactttggatattaatccattattaatcaataatagcttgcaataatggatatatggcttgcagatattttctcccaattcgcaggttgtctctgcacactgttaattgttcttttgctgtgcaggagcttttaagtttgatattaccaaacttgtgtatttttgtttttgttgcctgtcctttcggggtcaaatcaaaaaaattattacccagacaaatgggaaatattttttataatgtragttatggtaaacttgttgacacttcttttaggacctaaaayatggtctatcttgctaaatgctctatgtgcttttgagaataacrtgcattctgctgtttttaggtggagtattttatagatgtcaaacaggtaacactggttgatgatgttattcaagtcttctgtgttcttgctaattttatgccattttttctaggaattattgtaaagggctactgaacctctgaacrtaatgcagatatgtgtatttctctttgcagatctatcagttttgcttmatttactttgaagctttgttgtcaggggcattttggcccttttataaatccctggcaatattctctgctttgaaacttactttgtctgatagcaatatagccattttagctttcttttgactagttacagcataaccttatataacatatttgcawcttgtatttaaagtgcatttttttagacagcaagaaattgagtcttttgmtaatttttttaaaaaygagtctgccttttaattgaaatgtgtaaagctttgcatttaatgtgattaatgacatggttagatttaagcctatcatcttgctagttgttttcccatcttctctttgtgacccttttcttctttttctgcttcttttttctcccattagctataccttttcattagaggttacttcaaggtttgttggatacatctttaattcatcctgatctatcctttcagtgatattatttcagttcacatatagtaaaggaactttgcaatggtatccttccatttctctccttccagactttgtactgtcatcatcatcatcatcatcatcatatatatatgttgtaaacgaatgttatttttatgatacattttgcttatatattacagagatttatgtaataagaaaaagtcttacttacccatgctcataaaaagagcactaaaatcacctagagcttaaggatgaactggctgtcaaataacaaaacaaacaaacaaacagttgccttttcctgtgctcttcattcttttgtgtagatccatatttccaattgataatttccttttgcctgaatggcttcctttatcatttttttctggtatggatctgtgggtgaggaattttttttcagcttttgtatatgtgcaaacatctttattttacaccctccttttttattttgaaaaatatctttactgggtatagaattctaggttgacagtattttacactttggtgctttaaagatgttgctccagtgtcgtcttgcttgcattgtttgtaatgaaatatctgctcttatccttatttgtgttcctttgtacataacacagctgcttgcaagttttttttttaattactasttttaagcaaattgatcatgatatgctttgtaattttcttcataatttgggggtttgagattcttggatctgtaggtttatagttttcattaagtttggaaacttttcagttattatttaatcaaatatttcttcatacccttccccatctttggggattctaagtaatagaatattggcttcttgaaattgttttacaacttaccaatcctctcttttgattcttttttctcttagtatttccgtttggatrgttttggttactatttttcaagttcactatatttttcttttgtaagttctaagcagctgttgatctcwttcagtttattttttgtctcagatattgtagctttcatctctagaagttcaattttggtctcttttttaccttccatgtccctacttaagtttttgatcattggaaagccagcataattactgctttaatgtcattttctacaaattctaacatctgtgtctcttctatgttagattaagctgacttacttattctctttattatgggcctagttttctttcttctttgcatgcctgataatctttaataggatgccagatattggatttgactataaatattcttgagttgtgcccaggactgcagtgaatttactcaaaacaatttgatttgttaggaggatctaaagaagtgctcatctagagttaattgttctccactcctgaggcaagactttcctaagttccctagcagtgctgatgaatgattagtttttccagtgtggctggtggaagcaggcactgaccccagatctatgtaacacagaacacagttccctctatttctctcttatttgcaccatctttaatctcttaataatactttatagttttcagtgttgagatcttatacattttttagatgtattcctagcaaagtgattttgttagcttattacaaatagtgtgcttatgaattcaatgtgtgtgtgtttacatgtagtaaatatagtatacatgcatatgtatgtatgttcatacagtctatagagacatagtaggtgatcttgtatccagaaactttgctaaactcatgtattaattcttttttttttttttttttttttgacagagtctcactctgttgcccaggctgaagtacagtggtgctatcttggctcattgcaacctctgcctctcagtttcaagcaattctcccacctcagcctcctgagtagctgggattacaggcacacaccaccacgcccggataatttttttttttttgtatttttagtagctatggggtstcaccatgttggccaggctgttcttgaactcctgacctcagataatctgcctatcttggcgtcccaaagtgctgggattacaggcatgagccactgtgcctggtcactcatgtattaattctaataagtttctaagattattttagatcttctacacagtcattttatttttgaattatgatagcattatttctacctttttagtcattatacttttttttttcttacctaattgcagtggcaaggactccagtacagttctaaatggaagtggtgatatcatacattctttccctgatacaatgtgtaaagggaaaaatttgaacattgtaccattatatrtgatattttattaggatattggtgaatagcccttacaaactaatgattcttttattcgtagcctgctaagagaaagtattatgaataaatgttgaatcaaatgcatattctgcttcagttgagttgatcatatgatttttctctttttgtgttaatgtatctaatgacattgatttttctaatgccataccaatcttgaattcttgagctatatccatcttcctaatgtattatcttttatatatttctgggattagtaaactaatgttttattaagaatttttggccgctcacacctgtaatcccagcactttgggaggccaaggctggcagatcacgaggtcaggagatcgagaccatcctggctaacacagtgaaaccctgtctctactaaaaatacaaaaaattagccgggtgtggtggcgggtgcctgtagtcccagctactcgggaggctgaggcaggagaatggcatgaacccgggaggcagagcttgcagtgagccaagatcgccactgtactccagcctcggcgacagagcgagactccgtctcaaaaaagaaaaaaaaaaaagaatttttgcctaaataagatagacttgtacttttgtgttttttaatatgtttattgtgttttagtataaagcccatgccagcttcataaaataaattaagaagtatttgttctcactactggaagagtttatgtaagtgaatgttatttcttcctcacatttttggcaaatttactggtgaagccatctgaatctgaagtgttttttgcagaaagattcaaactacctttcaatttgcttaatgttaaagaactattgagaatatgctgggtttttttctactctaaattttagaaacttgtatttttctattaatctgtcttttttacttaaattttcaaatttattagcattcagttgttcacataacacttttaacctgttgatgtatgtaggatttgtactgatgttcccttttttatttctggtattatataatttatacttttttcctagatttgtcttttaattagttatttttatttattttttctgctattgtgtttagtatagtcttcttttttacaagttgtgcctagctcattaatttctccttttagtattccttaatatagtcaagtagactattaatttccccgaaagcaagcaatatcccacaatctttgatacgtagtacaagttgaatattctttttcttttttttttttttttttgagatggagttttgctcttgttgcccaggctggagtgttggtgcgatcttggctcactgtaacctccgcctcccgtgttcaagtgtttctcttgactcagcctccttgagtagctgggattacaggagcccacaaccatgcccagctaatgttttgtagttatagtagagatggggtttcatcatattggccaggctggcctcgaactcctgacctcacttgatccacccgccttggcctcccaaagtgtagggattacaggcgtgagccagccaagttgaatattctttatctgaaatacttaagacaagaagtttttcagatttctgatttttttttatttttgggatattatttgcattacacttaccagctgaacattcctaatccgaaaatctccagmgagcatttcctttgggtgtcatatgccaacacacaaaaagttttagatcttgaagcattttggattttggagtttccgagtagggatactcaacctatatgtttaatatcatttacaaaaatatttttcttaatttctctcgtgacttcttttctttgactaattggtcatttagaattgtattacataatttcaaagcaaatgggacttttagtaattttctttttatggtgaattctgatttaagttaatcctatatgaatttagttttttgaaattgattgatacttgcttatggcacagaatatggtcagtacttgtcagtgttgtgtgagtacttgaaaaactgtgttctacagctcttgtgtgcagtgttttatacgtgtccattaggttagtttattaatagtgatgctcaaatatataacttcctggttttttgactgttttatcaaatactgagaaaggaatgttaccaagtttgtggatttgttttatgtctcctttgtttctgtcaatttttgtaatatataatttgagtttatgctattaggattatataaatttagacatttttatttttcaaatgagttgaactttttaattcaaattaatgctttttatatagagacatgctttttgatttaatactatattatctaatattaatacaggcacgctagctttctttttgttactctttgccatttatatctttttcagcttttcacacttttctagtatctgcatgctttaggtctttcttctcgtcaatatagtcttgagtttttaaattcagtctgacatagtttttgggttttcattaaaatatttttcttgatccacttttaaagttactactggtatatttgagtgtgaagcatccatttattatttttatttgtcctgcctgatgtattcttttttctctccatttttgccttctttctgattcattgagtttaccatgctttctttggttggttcggaaattatatgcttcttactataatatggtggttacatgagagattacaacatgcatctttgactatcagtattaaacattaattgatttgtattctctttctgaataattcaagggccctttttaagcaaaaaacatctttttattctcttccaacttacatactcttgtgttttgtaattgtatcagtttatgaattgccaaagacattattatttaatacagtcaacatgcttttatatttactttcttatttaccgtttttgttgcttttcatttcttcctgcatcttagtcctttcatcaggccaatttccttctctctctctctttcttatagcagagatggggtcttgctctgttgcccaggctcatctcaaactgctggcctcaagcaatcctcctgctttggcctcccgaagtgcttggattacaggcatgagccactgtgcttggcctccttctcttttaacactactgtttagtattttctttagtttttgtgtgccagtaacaagttttatcaatttcccttttttttttttgagacggattcttgctctgttgcccaggctggaatgcagtggtgcaatttctgcttactgcagcctccgcctcccgggttcaagctgcaacctccgcctcctgggttcaagtgattctcctgcctcagcctcccaagtagctgggattacagacacgcgacatcacacccagctaatttttgtatttttagtagagttgagatttcaccatgttggccaggctggtctttcaagaccatgacgtcgtgatctgcctgcctcagcctcccaaagtgctgggattacaggcgtgagccaccgcgcccggccccaatttccctttaagagtttattttctttggttttcatcattttagtgtcatgtgcctaggtataatctcccttcacagaccctatttaaaagttcttgcatctgcggtttgttgctttttagtcagatttactacattctcagctattatgtattcaataattgctcctgcatcattctctctctctttttcttctggggccctgattacacacgttagacttccctctatcctttatggtttcttccctgtcttctgtacttctcatcctttcatcttcccatgcttaattcaaaaccatttttctcatgtttcttgtagtttgctagttttctctttgtgtttgccaaatctgctaataagccaggcagtcagcttttaattgaaaatttcatgtgggctctatattttcaaaatctctaaggtcacattttataatttctagctgttgtaaaatttcaggtgcatctttagctttatgatcacagcaagcatgattttaaacttcctgtggatctgttcctattcttgttttgttggttcttccatgatgctttacatcctgttatgcctggttatccctgagtctgtgtctgacattgtacctggaaattgattttttacaaataatttgaggccttgtatttcatatatatatacacacactcacacacatacatgcacacacacatacatgtgcacacacagacacacatatataaagaagacttytgctggttttgtttagtatctaggggttctagcaayttggaattattatactccatttttcacattgagatttttctgggccactcagttgactctaagctgggtagcagctgcacaaaaggagctcagcagtgttctggatgtgtttgatgcagtggcaccgtgttgtattaagttccatgttgaagctctttccygcagttcacctctgtgatgccgttcttcctggttgcgttagaaagcataggtgtttatcaggcccctctcttggtaggttttatagtagacagaatagtggtcccccgaaagatgcccacatcttactcacctaaacctgtggatatgttatgctacatagcaagcagaaatggaggttgtaagtggaattaaggctgttaatcagacctcactatcaaagtgatacagcgtgagacagactcaatccccgcacactgatgactttaaaaatggaaggaagccataagtcagggaatgtgactcaagaagctggaacaagcaaagagatgcattctctyctagagcctccaaaaggaacacagccctgccaactccttgactgtagctcagtgagacctgtttccaactttcgacttccaggactgcgagacaacaaatgactgttgttttaagcaaccacatttgtgttcatttgttacagcagctacaggcaactaatataggccccgagcaccaacatgtgtctcatgagctccactcaacctcttaactacatcttgcagaagctgtagaccctcctcagggaaaagaaacctcaaagcccagcctcaactctggatttttgtctttttatttcttggcttgcttattcttcactttcttgttaaatccttcatacctccaggcagctgtcttcagttttctgtccagcatctctgtttgccagtaactagaggtttggtccaaattgcccagtcgtctggtgctggataacttttcttttgaatctgatgactgagcagatctggttgtgctttagaatttcacatttctgttgccatttcagtcttggaatcattccccagattagcgcaagaggttttttcttagctgacctctttttgtattctccatcccagttggcctctaaaatagtagtatggtcttcctctatgtggctaccaatggccctgtggtccatggaactctgcctttagggtcccttttattacaaatacactgaggctccagacccctcttacrctgtgcacagagagagcaccttttctccagcaaggctgtctactgagtgagckctaaagcatgacacgttcacacccaaaagccgtgcctctgctcacaccatcacccccacctgtagtgatggaagaggcactaagtggcctgtggctgtggaagcagacagactgatgtggatctcactgtgctaatagctcagcagaggggctgcaggcgggtttcatgcagggacaccctgttggattaagtacaaatacgttcaagagggcaattttaacgagcagccctcatctaggtttgaatttggtgttctgtgaaacaactctcgttacctactgcctgaatgcacagccagttcttagggactcttaggtgcatttgacggaggagaaagcaaggctttgctgacagccacagcccactgaaacagcatggagcgtttggggccaggagggaaagaaagggttttgattttgagacttcaaactctaaccccgcactgtgagcctttgaattttgccaccatctaccgaggctttttgactgtgcgacagtcaggaggcaaggggacaaaagatgaaaggcagaaaaggcaaggggaggctggcrcctgcgttctaaactagaatttaacaagggaaaagctgcctttctgctcagaaactaagggaggaccacttgatctctaacactggtgcttgcggcaagaaaatctccagttagaaaaagaaggcagaacccagacaccccttgatcagtttctctgaggcgtgagcctcccaagaagccacctgtggacctgtgtgaagctgactctgaaagaggactgcggaggcctggatgccagttctcattgtccctgtcagcttgtcaccgtggagacgagaaccacgtcaggcagggacgcagcactcacagagtccgtcacatgctgtgtgacgtgcagtggagtgtcccgccatgagcggctgggccaacctacttatcacttccatatttgggataccttaaataatacaatcacagccgctattatagattacattgctgtctaaatgggtttcatgctcatttctattcagtatttgtcacggggcattaacccmtagagtaacactgaatctgtggaacttggagaaattatcactttgagttaagtttccttgtacgttcggtgtttcttgccaccagacgctttcacttgggtatttatttattatttattttttcaataaataactgattgagtacccactatgtgtcaggagacacgtggtggacaaaaacagactactttgctgtttcagtttagcaaattgaaaatgttcacctgacaatacagtcttggcagtgaaaaagtaaattcactcattcgttcagtattgggatcgggccatctgccctcctttgaatttccacagcactgaccrtcaagtggtaaatacaaattagattgaaatacaaaataataataatagtaataataaagaaagtacaaaacaaaagagttggggtaattattccattaatttgggttaaaatgcttgacttaatttaatgaaggcattctttacccatgatcaataagtaaggagctaaggagccggattagaggctatgwagaaatcattttgtattgctgccaggggaaaagagcccgcactttaaaaagaggaactatgcattctggaaccacagagacgcctcagcaggccctcttgggagatggtgcggcaggcaggggctctaggtccccaagagcccagcacggagttctggggtgatccagaagcttgtggcacctgagatccttctgaaataagcattcgtcaccctctgaccatgtgtgtgccaggcactgtgatggtctcaagggcacagagtacctgtgctcagggaacctgtggtctagtgaaggaggaatgggagccagctccagccacacccaggaagcacggggtttgatgtctgcatggggactaagcaagttcggagctgtggcacctgcctaccctaccagggggccgtcaggaaggcttctccagaaaagacaacatcctgaaatgctaaatgaagggcacttcgcctgatgctgtaggatggcaagacagaggaagccatgcagaaaggtttgggcttcctcagggttccctgcgtggcaggaatgggtgctgggagggatggtagccgaggaggtcagcgcagtgaccctgagcagagctttgctgttgcacgggatgaggattgcattctgtagggcagcrgctgtctccaaggctttgttaaggtggaaaacttctgtgatcagacggggatcattcagtccagggacaaacaggcccatagcaggtggcgagaccaaagccaggtagacagaggtgttgtgtttgtcactgagagccttcgaggaccatgtccaggcgtgatgtcaaggctggaagtgaaccagggggacctcaccctccttgtgacctgggagtatcatgaagggaaatgcaaagggcgttttcagaacgggatccagatgcagaagacgggagtgtgtgtgttttccacgtcttcttgctggtgcaggcggtggccctgcctggctggcaggtgctggcccctgctctctgtgcattctctcaccagggttctctctgcccacatcatccagagacccagacaggtggcctcactcacagatttccacctggagcgttaggcagggtccctgctggcagcagacctgcagatgacccaagtgtgcacctgtgctgtgtgctcacccaatggctgaagcaatatgaacctctttactttagtttttttatgatagaaaaaaaataacagtatcctctttaatggactgtaaatgccctttccaacatcactgctgtttcaagatggaggacatctgtatttgcttttgttgagtacttagtagcaattcacttaatacaaatgtgaaatacaaggttggtaacagaatctcccctgtgaatcaaaccattcattcaagtagcaatctgggcactgctgaattagacacacgcctcccccatgtggttgaagaggggacacagctgttctaccaggaggaggtcccaggcatcaggaggaaacagaagcatgccgcagggctctgggcatccctggagcacctgctgctgcggtctctagcagaaacgcaagttcaggggcagggctggagggctctctgttgcaccactgtcctgcctctttctttccacctagtcaggtcaaatcactttgcccaaagaagtttcagaaatatctgtaagacaacaacagaaactgtgagcactttctttcttgccggtgagatatttatttgaacatgttgctctgcagtgggcgaacccttcacggtgtckgcttccttttgtctgagatgctggggtgctgcagcagagatgcagagggcagtgcttcagcttgaggctggcatgtgtgggcagcacttttgcaggtgatgctgtttctgcaatagtgagtctgtcatcccaagcacagggattcattggaaccatctctgcatcctacaggattgtggacttatagggcaacagagaccccggagatccgagtccaaatgccctctcttcacttgccaaaagtctcatatttattaatcagaagaactagcactaagtccccgggctcgctcctgattttttactctgtttttgagtgggctctggtaagcccacatccacaggcattgctgaagatggaaagagggtatctatgatcagattaaggtatgttgagctgaagcatgttttcaaaatactaaaacttaaattttggaaacttagaactttaaaaagcaattaaggccgagtgcagtggctcacgcctgtaatcccagctacttgggaggttgaggcaggagaatcgcttgaacccagaaggtggaggttgcagtgagccaaaatcccgccactgcactccagcctggatgacaggagcagaactctgtctcaaaaataaaaaataaaaagcaatttaaattttgggggacgtttctatagaatctgttacacattttctggcttacttgcacaatctttttctgttaatgccagattgtctctgcaggtattgatggttgagctgatagctcagaggccaagaaagctccagtctgtcactccaagaccactgtgaccttgggcacgatacttaaagatcctaagttgaaggtggtgcaaaaactgactttctagcagggttgcctgataattgtagggcacttagcacaatgcctggcatttggcaagcctcccmaaacttgtaattatgttgatggtgatgacgatcagaatggcagtgccctcacgaattactggcgagggagactttatgtacttgtactgaaaggtgccagatttctggtctatgttcaacttgatgattatttcatttcttctcagtcaattctcagagttggtttatatccacttaaaaatgtttaaattgtgtctcccatccaagtactgaccctgcttagcttccaagatcagtcaagattggatgcattcagggtggcatggcmgtaaatgaaattttttatcatggcaaaatatgcataacacagagtttactattgtaatcatttgtgagtgtacagttcagtggcattaagttcattcgcattgttgcgcaaccatcaccaccatccatctgtagaactgcttcctcttccctagctggatatctgctttttaagaagaatggagttagtgtgcccagagcagaagggtggatcgggggcctctacytttgtccatgctccagggggcaggttgacaagtctgactgatggataacttgggcatgacctcaaagctggtttggaatgagtcaggggtagacatgagtggatggagggataaatcaatgtatttcctaaatggggagtgttgctgtgttgcctgttgttagaaataagcaatgtaaacaggattttcctcatccagaaggtgtgctctggatatgaaatgctttttaaatgagaaactcaaagatggtctctgtattcgtttactggggcctcattgatgaaacaccgcagactgggctgcttaagcaacggaagtttattttctcacaggtctggaagctggacattcgggagtaaggggtcagcaggatggtttcttttgaggcctctttttttggcttctccctgtgtccttgcatgatctcccctctgtgtgtctttgcgtcctgattttccctttgtataaggccgccagtcatgtgggattagggtccaccctgatgacctcagtttaatttagttacctctttaaagacttcctctctaaataagggtacgttctgagctacgtggggttaggacttcaatatatgagttctagcggcggatgaggggctccagttcagcccatgccagtctctagagatccctccagttctaaaaatcctccaaatcctccccagttccagaaggatgcagaggaagccagccgtcccgtgcctgggacctcccctgygcacactccccagggcatgggattgttggtagaacattacaaacacagctctgaagtcccagagacagaatgtcctactgtttctgagccatgtccatgacatttttcttagagagaaagaataataaacagagacaaaatattttaagtcctaccctcctcgtctgccaagaataatcctggtgttctctggaactcactgccttcatggccatcctgtactttgtatctgcaaatgtctgccctggaaaaagccatccactggtttcaagataatccacaggctttaaataaacacaagactccttgaaacagagccctgctctggaaatagagcgagaggccatttcagtccaaggagaagagagactgatggctaattacactccaagaagagccttttaaaatagcatttcaatttcagttattgaatcgagctacgattatctagcacacgccccttttaatgtacgctttacactgggaaacagtaggaactgagttttgagtaattacctttatggctgtattctatgcagggaaatgtgtggttgcggcagagccatagttaacctggggtggtgtcaacagtgtttatgccatttctataatttttaaccaccttcactttttgtatgtgtcattaaagayagttcarttttttaccatgttatgacacttgctagattaagtagaatgccaggcctgaccagagagctgataaaaaagaaatccactaattgtgctcgtttatactgaaggcttattccctccatttctctcccttcttcctccttccccccactcctaagcctttcttatgagccaggctctgttttatctatcaatggaaaaattctaaagacatttttgtggtgagttgtcagggtttttttttaattgagcagaatactaaagaagttgttggctcactcattggctatgtaaatctttttcatcaaagatccatgaagatcatgtagtgtacgttgaaaaaatagaatttattataagctcctgttttccaggtggaatttgcttccctaagtctgtagaaatgggcaagtgccgtgtgtcttaaaaaactcattcatccctttgcttcattgatggcctcctttgctttatcgcctgttctctcattttgcaatagagctgcagtcatttctgctcacttactaaccagtaaccagtaccggtcccccaattgtcactcgttataaaatgattaactgttatttattatacagtggagaaggcgktgctttggctttccagagagattcataggcagagttcttcccccgtgaaatgtgcctgccgcggatgcragacagaaaagcgagtgccttttagaacggcgcagcctgagcccggatttctctaatgtctacgtgctgttattttaggtctccgaattcaatcctttgacgttcaccagcgtgatcgaatgcgagaagccaaacaacgacctgagtaggtttcgcggctgcatgtgagtatcgtgcgtctgcctgcgcgcatccttctgtttgataactacataggcaggtgtttacacattctcagttataaagtatgcatttaatactctttgccacatggtgtagctgtttgggaatgtggcccagcacctgagccttcttggctgcttttggaagtaagagcctgttgtcagtagtgggtaagagcctgttgtcagtagaagcttgccactaccatctgtgaggaggaggtaccgcttttcctcccgctagcaggccccgggtaggtgatgggtgtgacaagagatgtgtagctgaccacacatggccccgttaacrtggaagcaggagtaggccgggtggagtttcatggatatatgcttccactcagtcactgaacacgtatttattgatacctgttacatgctgggtgcattcaaggcactggatgtaatgtggtaaactgaataaacagaagttcctgcctttgtgtttatttcattctagtttgggggaaagaaagacaattaaaacaaataagcataacctagagtgtgtctagtaggccagccccttcctgctccaaaacagaaagacaggtggatcagggcacaggcctggccctgtgttggcacttgctgaagccacgtgatggggagtagtagaaaccaccttcatgtctgtttgaaaatttccataataatcggagtgtgtgtgtgtgtgtggtcagtgctgtgggcaaaaacatggaagagaataggcagtgtcagaacggagttgctgagtggcctgccagggcccttggggatggtcttctggagaacaaggctgtgacaggggcatgacgcacatgaccttcctctgccctcaagctctgttccagctatcatgcctcagccacctcccgtgggctcagccctctcgcctgcagcacaaggggccacctcctggcactgtcctgcttggaggcagggatggacttttgacgcctgcagccgctgaatggcccaggcagtgggctcgcctgccccacccacttcccccacccccccgctcccaccacgcagacatacggaggcgtgggagcgatctgcttctggaagtggccccatttctaagagctttcggtgtaggttgagtcttctgttttgccagcacctccagcattactgcctgtgcccagcacacagtggcaggcggtagggctggggatgacccaacggaagtgaactctgcacagcaaaagctgaaatgtgtctgcagccaagtgatggccccgtcacccactggaattgcccttattatctgagaatcagacaccgatagcattaaatcaccccttaaataagccaattaaagcagggtaaaactcaacaacaaaatgtaagcatataacctctacgatttggggaggaaatactcagcacaacccgtgtgctgtggcttttctggtctttcttgactcctgggccatcttccccaggcctccttgatcccttgccccaagagtttgtgtgcagggcaccatcctcagcactgctgggaatccccaggcacgagttggctacagagagcaggtgctgggttgctagacatcttgacctgaaacaatgattgtgaagggtggggcgagggcaatctctggagaatgttcagtggtatccctggaataattttacrgtgccaactccaccaaaaaacataaataaataaggggccgacttyctcttctgaagactgcactcctagctcattgtccttggtgtgacagggcggtgcctggcagtggagrcacagcagggacagatacgaaggcctgcagcctgctggatccacagagcctaggaaaggtgacggccctctgctggggtggacgagaggggcggggtcyggtgcaggagacgggaggagcattgtattgctcagccactgtctctagcagtgtggtgaggacaggagtctgggtggtgtctccrcccygcgctcagccccagcacctcactgcctcccacatgaggcccttgcctggctgtgtacccccaggcctggctgcactccccccgggtgcyggggaagatgcctcttgagtgggtgtcatctgcctgcagccagccagccaggcccaccggggcttctccagcctgtgccgccaacaggcgttcctcgtgtggtgtcctcaccggcatgttgcccgagaaagggacatgagaagagcagctctcccagcatgaaatcctttcctgctttgccctcagtcatgtcgtgttgtctcctcgtgtactccacccatcgtccaaccctggtagcccccttgtggcctgggcrcaggcaccatctgggccagtgtgcgcccagccaattcaggcctctccacacctgacgctctttaacgataattcgccatctccaccagccggggtgttctgggcttgccacagggctgtcagggcctggatggcccctctcccagccagacaggtcaggaggggcttctgggggtggagcagcagtgtgttaatacttccccccgtgactgtggggcacgaccaaggggagcagccctgccccggaccatcagcctgaaggggactggggcagcctcgcagtgaggaatactcccggggtaggagtgctccctggggctggagtgctccctcgggcatgaatcctccctcctgtagggcctggtaacgctatccgtcccaagcaaagagaaaggaggtcttaactccataccagtcctgatgcccagggcagggagctaagttgggaggtagatctgctgtctaggctcaggaagtggctcagctgcagagccacctccctggtttgcttcctcccactggcctccttgcagcctccatgaggcagctgctgccccgtaacctccttcacaccacagagcccaggaatgccggcagatttgcttcttttaggacctgccattccaaacttgaaacattaactgtttgcacttggagaacagaactgagtttgggtttgtagcaagaagacccaagtctgaatacaggctctttctcttccctgggaggtggccttaggaaagttattctgcctttctgagcccmggccttctcctaatcctggaggtatcatcgactgcctgtcaacctcacaggctgacatgagagtccagtgaaggaatgaaagtgaagtacaacatgaattagaaggtgtcgtggccgggcgcggtggctcacacctgtaatcccagcactttgggaggccggggcgggcagatcatgaggtcaggagatcgagaccatcctggctaacacggtgaaaccccgtctctactaaacatacaaaaaactagccaggtgtcttggagggcacctgtagtcccagctactcgggtggctgaggcaggagaatggcgtgaacccgggaggcgagcttgcagtgagccagaatcacaccactgcactccagcctgggtgacagagcgagactccatctcaaaaaaaaaaaaaaaaaaaaaaaagaaggtgtcgcatgtgaaatgctcacagtaggaaaatcttagacacagaaagtggattggcagttgccagggtttgggggtgtggaatgagataggaatgggaagtgactgcccgtgggtctagggtttatttttagggtgatgaaaatgttctcgttagctgggtgtggaggtgcactcctatagtaccagctacctgggaggctgatgtgggaggatcacttgagcgggggaggcagagattgcagtgaaccgtgattgtgccattgtactccatcctgggagacagagcaagacccagtctcaaaaaaaagaaagaagaaaatgttctcatattagctggtggtggtagttttacaactctgatgatacaaatacaaacagaaaaaaaattagcctgtgcagtggctcatgcctgtaatcctttgggaggcctagatgggaggttcacttgaggttaggagtttaagagcagcctggacaatgtagtgagaccttgtctctacaaaaatcacacacacacacaaaaattagcctggtgtgggtgtggtggtgcacacctgtagtcacagaaactcaggaggttgaggtgggaggatggcttgagctcaggaggtccaggctgcagtgagctatgatcacaccactgcactccagcctggacaacagagygagaccctatctgaaacaaaacaaaatacagaactctatgaactttaaatgagtgaacattatagtatgtgaaatatatctccagctggcagaaaaatagtgctaggagcctcattattcaagtgccctttaaggctgcattctttggaaggatcctcatatagttaagccctagcgaaatcttcagagttaggatctggaagtaacatcgttccccaccttctccagctgttcccagcactcactccttagccccaaccctgagatgtcatcgcccagagaggcctcctgggaatggaggcctggctcagcctgaccctgctgattgtgctcagccaactttatggcatgtggtcacctctgaagccacaaatcaatcaaacatttgcactttcccctaaagaataaagcaaagaggttggctggttagttggtcatccaatgtaaaattccatttcacattgtaaagcaggttccctagttctcttttccgatctgtcaatgtttgctttatatacttgggtgctttgatattggatgcatacatatttataattgttatgtcttcctgcataattgacccttctttgtcttgtaggatagtttttgacttagtctattttgtcggatacaagtatagccaaccctgttctcctttggtgaccattcttaccccacagagcaggcttctgacctggagagcctcctacaaccgcatagggccggcacgagcaccagctgcattttggagtaggctcttcgccctggtgggtgacacccttcagagacggtggttagtaaagacagcagggctgtcactaacaacagagctgtcagggtccctgccccctcctgcctggtgtctggttggagccttgtgtgggctgtatccaaaatgtctttactgccagtgaccaagcattaaataaactgcatcaactagactcattaaaactggaatgttttaatttcgccttgccacctttagttgacatatttatatcttaaaaatattgaacatcagcacaaaacagtctggtaatttccacacttacttttgttagatatgaacatctgatgattttatacagaaatatttatttatttttatttattatttatacaaaaatatgaacatctgattattttaaagcaaattctgcccaggatttgccaatggaaggaattatctgtcattccttcctcccaacttatgtcagtcaggacccacttaggaagccgactgaacaccctgattcatatagatgaggaaggatacttggtaagggtgcatctttgctaaggtgtttctgcaggagtgggtgggtgtaggggacgcatcggggacagagcagatgctagattagtggccgctgagcagtcactgccatgaggccccatggggaagagtggccctgggggactcatgaccagggagatgcctggggagactcatagccctggtcaggggacactgccagccagtgctgcctctctgggagggagcagggaataaactccctgtccttcttccttccttccttcctttctttctttttttttttgagacagagtctcactctgttgcccaggctgtagtgcagtggcgcgatcttggctcactgcaacctccacctcctgggttcaagtgattctcctgcctcagcctccctgagtagctgggattacaggtgtgtaccaccatgcctggctattttttttttttttttgtatttttagtagagacggggtttcgccatgttagccaggctggtctctaacttctggcctcaagcaatcctcccacctcggcctcccaaagtgctgggattacaggtgtgagccaccgcgcccagcctactccctgtcttttcttgctctcagccactcctccagtgtccttcctgtcatcccgcactggagggacccagctcaaagccaagggccgggcagccttcaacgtttgccaggctctgaggtaggcactggggtgtgcaatggataggacatgagcagctcctgtttggaagcagagacatggaagcagatggaatactgccggctggcctgggtggggggcctgggagtgtggcatggaggactgccctgaaggcggcagaagctgagcccaggccggaaggccgggctacctcaggcagaggctagcacagagtggacagaacatgctgtgtgggggtggctggggcagaaaaccacagaagccaccccttctgtgggccaagcaggggctgcagggtcggctggttcccacgtcaagctggagcaatgaggagtcctgcaggggacactcacaggcgtacactcgaagattgctccggtgcctgtgtgaggaacccacatgaggaacccaggccagtggagctgaggccagcaagcgtgtgttgccggctccagcagagaaatgcagacgcctgaatcagagcagtgctgcatggagatatacagaagagggcatggattaaagacacagccagggagatgaggttgaatggatgtaaaaatgggggaggagtcaaggacacctggtgacagggtttcaccatattgatcaggctggtctcgaactcctgacctcaagtgatccacctgccttggcctcccaaagtgctgggattacaggcgtgagccaccacgcctgtccaaaggacctcattttaacttaaggatctctttaaagactctgtctccaaatacagccatattctgcagtcctgggagttagggcttcaccagctgaattctgaggggacacggttcagcccatgacaacggagctgacggctcacgttcttgtgtgtgtctttgtggagttgagcctcgtgcctgtgtgcttctgggcctgtgtcrccctcggccgggcctctctctctcagaagcccaaggcagcctctagcccaggtaccaggcacctgatggtgatgtcgttctccagcctcccctttgtgttgtgggctgttcacgcaggagtacgttcccawcccctcgcattcgctcttccttctggcatggacctgtataggtcgatgcacctgtgtaaggtgccaagttgccgtctggcttggactcatcagaaatcacagtagttgctcaaaagtcagtgtcacartkaagaacatttaatgtagaacatttttcttgtttctataaagtttatcgtttgtccttaataagcataacctgaacttggagackatttgttattttctactgtcccagtgcaatggtgtctttgtctggctttcgctggagaagtccacgggagacacgtgatagggggtgtcctcactccacaagygcagagcagggttttgtacctaaggatatctcatacctgccaggcttttgatgctgtggctggcaaagtggtttgccgtctcgaatctctctttaaaggaaaaccttactccgtcttggcattgccaagggagcagtagacacggcgttggctgaacggcccttgwgtggccccacygtgtctgctctggcgaagaacccttgctgttggtaaataactgacttgtggaaaatatatcctcccagcttgcatttcagccttgcctttactgtttagcttctcttcttcactaggacataggtttatttccctggtcagaaggctaatagttggcaggagggaaacccctgcaggggtccctggtgagacgctaagagccatacaggaagcatgtgggcttgagagtgtggggaatgcgtgcggagagggggtgtgggtgtgaaaaggtagcctctcggaaggcactcccttggtggccctgcctggcrtgggttaggctgggcccctgctgttgttctggaaacctggaaccacagcaggcctgggytacagttccggttatgaggcctccccctgtgacctgtgctctggcccctggggccatatctgtcccagggcggtcctagcccaagactgcccagccagcctgggtcatcagtgggcccggaggacaagtttgaaaaccagtagcttaagcttagactatccctctggatctaaatagcagtaaaacagaatttatagaattgtttcatggaatttaccacatttcagaccacatatattaatacttctaataactttataacttcttgtaagagaaaaggatgttaaaaatgaaaccaatatcgtccccttttgtagaaagatgtttgtatttttatgacaacttgagactgattaggagtaacatttcctgtgttgagcaggagatgtacagagaccacgtagcaaggccttccttggccggttgggagtttgcccttcctagtggtgatcagtcccggagtgaaaacaagtctatctgcaaaacamataaacaccaggctctagagctgcttctggatgcctagtgactggtgaacagcagttctgtctcagctcttgcagagacccacagggcgagccacccactctcgggggccccctgtacccttcccagtccagatcccagcggccccaagctttcattgtgtcagggccttccttcctcaaggcattgcggctccagacatgaggcacaggcctgcaaccacgtgacatgtgccaactgtccctctacagcatacatgacaacgggaaaaaggccgggctgtataaagaaaacctgctgctgaggggctgcacccttaggaacacggacgcagtcgtcggcattgtcatctacgcaggtaggctcgggcacctggcaccacctgccgccagacagcgctgtgttctccagcacttcccctcactgttttcttttcttttttctttttcattttttttttttttgagacgagtctcgcactgtcgcccaggctggagtgcagtggcgcgatctcggctcactgcaagctccgccttccgggttcacgccattctcctgcctcagcctcccgagtagctgggattacaggcgcccgccacgcccggctccttttttttttttgtatttttttagtagatacgggatttcaccgtattagccaggatagtctcaatctcctgatctcgtgatccgcccgccttggcctcccaaagtgctgggattacaggnnnnnnnnnnnnnnnnnnnnnnnnnnnnnnnnnnnnnnnnnnnnnnnnnnnnnnnnnnnnnnnnnnnnnnnnnnnnnnnnnnnnnnnnnnnnnnnnnnnnnnnnnnnnnnnnnnnnnnnnnnnnnnnnnnnnnnnnnnnnnnnnnnnnnnnnnnnnnnnnnnnnnnnnnnnnnnnnnnnnnnnnnnnnnnnnnnnnnnnnnnnnnnnnnnnnnnnnnnnnnnnnnnnnnnnnnnnnnnnnnnnnnnnnnnnnnnnnnnnnnnnnnnnnnnnnnnnnnnnnnnnnnnnnnnnnnnnnnnnnnnnnnnnnnnnnnnnnnnnnnnnnnnnnnnnnnnnnnnnnnnnnnnnnnnnnnnnnnnnnnnnnnnnncagagtaagactccatctcaaaaaaaaaaaagaaaaaaagcataacatatccccattgtagaacatttggaaactaggaaaatggaaaggagcaaaagcaaaaattctttgaatagtacctcaacccaaagccttctttcttggcacggtagtgtatttctttccatttcgttctccacagtcattatatatgtataagattaatttcattttattttatttattttcagacctgttcaacaggaagtaagattaattttaaaccctgcttttttgaccaagcttctcacctaagcaccactgaatggcagcatggaattccctccacgccatccatgcagctggtcccttagctccagtctctgacttgccatgtctctttgtcctccccgacaggacatgaaaccaaggctctgctgaacaacagtgggccccgctacaagcgcagcaagctggagaggcagatgaactgcgacgtgctctggtgtgtcctgctccttgtttgcatgtctctgttttcagcagtcggtaagtctcctagatggatcggaaatgagtgggggccaggcgcagtggctcgtgcccgtaatcctagcactttgggaggccgaggcgggcagatcacttgaggtcaggagttggtgaccagctggccaacatggtgaaatcccatctctactaaaaatacaaaaaaaatgtgcctgtagtcccagctactcgggagactgaggcaggagaatggcttgaacccgggagggggaggttgcagcgagctgagatcgcaccactgcactccagcctgggtgagagagtgagattctgtttccaaaaaaaaaaaaagaaagaaagaaatgagtgggctccaggtgagcttggtgggctgcccccagacatgcaaacctagcactcaaaaattaaaaccccagtttttcactgacttgaactcaagggcagcctgcatcagcacaggccacatggaaacgcctgggtgaatgggcatgacagagtatagctgtccttcggtatccatggggggttggttccaggactccccctctataacaaaatcttcagatgctcaagtccctgacatgaagtggaatagtattggcatataacctacctataccctcctctatactttaaatcagcagtccccaacctttttggcaccaaggactggttttatgaagacattttttccacggatgtaggggtagcagaggatatggtttagggatgaaactttcacctcagatcatcaggcaccagttagattctcatcaggagcgtgcaacctagatccctcccatgcacaattcacaatagggttcgtgctcctgtgagaattgaatgctgccgctgatctgacggaagacggggctcaggtgggaatgctcactcacctgccactcacctccagctgtgccgcccagttcctaacaggccatggaccagtaccagtctgcagcctggggattagggacccctgctttaaatcacctctaggttacttataatgcctaatacgatgtaaatgtcatgtaaataatggttatactgtgttgtttagggaatacacacagatataatttttttctcctaatatttttggtccatggttggttgaatccacggatatggaacccacagatactgagagctgactgtaatgttattttctgaactgacgatttcttagtggaagaatgctttcatcacagcggtggtggtaattccaggggaagaagtatcagtaacctggtgctaaactaaggctaatagcaggagaagcacagatgttactaatgggaacttcatgaaaagagaaacaaaaaatggctttggatcctaagaagggactagcagttaggttccatgtagggctacaccaagtgggtgtgatgtggtctcagcccagcggcataagttacagatgtacaggacatgaaaaaggcttctgtgaccagacaggtgtgggtccagtggattaggcaatgtgcactactgttggcttcccagagcctcccatatgtgaattgtgaatctcaggaaaggacaataatggcagtgtctgagcctactgactgtttttttgctgcgcatttcatgagacaggtatttcgtgagatgcgtgttaagaaattctgtcttggcgcctcacactgtcagctgccaacacgcgggtagctctgtgttgggacaagtggtgccacttagcaccaacaatgggaaactctcagtgtaaggaagagaccaggtcccacctccttcctgaagttggatcgaaggtgctgagaacattgtgttttcgctttctgacatggcaaagctgagtaagaaaaccaaatgtgcttgcatcaggtaacaaatattaaagttttgctttaatatacgctagcaatattcttatttttccattggatgaatgacatttctctttgaacattactacaggacatggactgtggatatggcggtatcaagagaagaagtcattattttatgtccccaagtctgatggaagctccttatccccagtcacagctgcagtttactcatttttaacaatgataatagttctgcaggtaacaatactaagtatcgtacaataattgctttacttttatgaagagaacttaaaatcatcatactctgttcagaatttcctataaattctgcatctaggaagatggcaaatatatctacctggagttctgccttttatttttcagcctaaatcaccaatgggatctttccttgggtgatttttaagttaaaattctccttttctgttcttaaggttcttgtgctttgagggtttggtttgggtcactgttttcattttgttgtttttcctttcagttacttttaaaaaaaatagattttattttgggataattttaaggtttacagaaaagttgcaaagtcattgcaacttttctgtaaatcttaaaattactccaaaataaaatttagttttctaaataaattttacagagagtttccatgcatccctcacccactttcccctaatgtgaacatattacattgtcatgggacattgtgaaaactaagaagccaactttagtccttcgctttgtttttttttctctttttctttttttttttagacagagtcttgttttgtcgccaggctggagtgcagtgacacgatcttggctcactgcaacctccacttcctgggttcaagcaattatcttgcctcagcctcccgagtagctgggattacaggtgcatgccacacaccttgctaatttttgtatttttggtagagatggggtttcaccatgttggccaggctggtcttgaactcctgacctcaagtgatccacccacctcggtctcccaaagtgctaggatgacaggcatgagccactgcacccggyctagtcctttgctttgaayaaaactatagccttctttcagatcccactagtccttccataaatgtgctttttctyctccaggatttagttgaggttatccacattgcatttatctgcacttgctattgttactattattattaattcgcatgcytccctgacacctcccagtcaatgcctggctatctatgcccagaaaggtctgtgaaagagtggggagggtcccagagtccagaggacgagggggcagtggggtcactaccaaccttcctgggaactgagtgaccagaggacattggctcagcctttgcctaggagggaacctttgctgtctcrtatatgtgcttcatacaacaggaaacagtcttatttaactgtctaaattagttttctaaataaatgcaaattttgttctagcctcgagttaggactgtagctggtgtttgattaacgtacttcagttcccaggagwacccagttagtctgtgygtgatattctgagtctgtaaacattagttcaatactgttactctacaaaaacaaatgagtaagcaaacattaatttcgaggagaattgttcttaaattatggaggcatcactgaatgtttttctcaaagcctctttccctttcctctgcattgtacaagaagagcacagaatcacaaggccagcatctgaaaaaagactgtctgttgtgtttgcactgccccctgaacttggggttgtatccctgggaaatgggagaccagggaaagcctgggggtcgaatgccaccacggagtgtggtgtgaggtgaccttgcttatgaggactgactgtgccatgattttttttctcttttctctctttcctgtcctagcctctctcaagcacaacttgcttgcttctatccaagccatgggtaccatacttccagacaccatagtggatccccgccctgcagctgctccataagctgtcctagtttattctctttgccaatactctaatacttttccaatactgactctaaaccaacctatttaagctctcttaaaggtacagtatagtccctactttcttgcggttgtagtcatttgttatttaaatagatttgagtaattccccagctccctggtcctcacggtcrttcatcctgtgtgccttgtctcttccaggttttgatcccaatttccttatacgtttccattgaaattgttaaagcatgccaagtgtacttcattaaccaggacatgcagttgtatgacgaagaaacagactcgcagctgcagtgccgagctctgaacatcacggaagacttaggacagatacagtacattttctcagataaaactggcactttgacagagaataagatggttttccgaagatgcactgtgtctggtgtagaatattctcatgatgcaaatggtgagtctgggggtgcggggctcccaacccaggctgaaccagaaagctgccctatccagaattgtttggagacaacacacacacacacacacacacacacacacacacacacgcttcagggattactgattttcaaggaagtataaagacgtggctgtcacagcagctcaggtgcctgaagcccagtgctatttatagaacaggcactggcacggccgcccgccctgttcctgcagtgtctgsggtgccaggcatccgcctaagcaatcaggcaagccacccgcaaggagctcactcccaaggcatccrgtccccttgctctgccacascaagggacagagagatgtctctgttgtcatccatccattttctagtcataaaatcctcagaagggcactggctaattcatgtttcgttctcttccctggaacagtgttcctgggaactrgaaagatgaatcgcctcactcccaattattgaagcggtccccactcccacctctcccttccttatctgtggctgcctccttccaacctggtgtctctggggagacaccagcttctgaatcccagggtgtgactgcagccagcgccccaccccagtcaggagagggcatggaccagggtccccgccaccactgtgcctggggctgcagcgccctgggagtgagcaccctgcactgcagcctggggtccatttcctgcctgtgacagaaacagagtccatgctacagaaacagcaaattaaaaccggacagagggaactcaagcgggcatgactaggaagctgctctttagaaggatttggtgggaagcatctgttgtttaccagacacttttgtgagatttataaaaccaaggattatcatgatagccacagtcttcctcaacacaaaatgaaagcagtcatagtaaacagaaggcagaggaaattacccactttgtttaaagttttatttgccacccaaaatagataatcatgacagtactccatccactcacccatcctccctcccaccagcctccttcggcctccctctcctctctttttcccttctcctaccctcctctcctctccctccttcctccccttcccctcccatagttgctaaacctggtacagcacagtgcattgtgctcttctcaaaaacagaactcagcagagtcctgaggggatcagagacccgggcagtcggttctacagcagcccttaaagccgagacccagtttcagatagacacgaggaataggttttgagatctgttgcacagccaggtgaccagaggcaataaaaatgtattacacatttcaaaacgactcagagagtaaattttaactgtctcatcataaaaacatgataggcaagcaaagtgacagatttgttaattagcatgatttaatcatgccacattgtacacatacatcagaacatcacattgcaccccatgaatgtatacagtactgatttatccattaataataataatacatttaaaagataataataaagttggaagcttaggctcccaggggcaggatcccaactaagattacagaaagattctgacagttgccaaatgctrccataaaaccagagggtttccttgcctcaagacacagggagcttcctggtgatgaatgaaaccacatacatctcagcagcgtgttttagagaagtgcctggatcagctagctattgacaggcacccaggcaaggagcgtcatcagccagttatcttatgatctgacctctccagatgtcactcataaaggagttcagatggactctgagccccaagccctgctcacgtaccagaaccggctgtggaagccttgggtgtgccccctctgacagcttggcaagatgacctggagctagctggctgtgcatgcccaggagggggcattacctgctcctgggcctcatctttcctggggacatggaaggcatcccaggggccactgccgatcagaaactgcttcagaacaccaacataccagccgtggcccccacagcctctgagggaaggagggggccctgaaggatggctccatggagctccggatgtgcgggaccactgctgggggagggtgggatgggccagtccactttcttggcagctgaagcccagcccctcacctcatgctggacagagtcatgtgtccaggttctgtgcrtccttgcttccggtgcactgggctgatgccacccgagagctggggaggcatttgcggggcatctgctcctggaattaggatctccctgagttggaatcctggcattggcaagtactcagccttgtgatggtgggcaggtgacttccccttttttatccccatttttctcatctctcacagagggtctattaagagatgcgcagtggtccacgcggctggccggctccataagtatctccttctccggcctcttgacaggcccctgctgctttgactcarcaccatgcctgtgcttgaagttctgattaaacggttgttctgataagtaatcctcatgaatggtctccattttgctcatccacggtgaaacaagctgtcctccctgggcaaaacccagaaaactggttcagagccatgggttagcaagaagccacagcgcaggcacctctaaaggggatttgcccagcgttcaccaggtcatggggaatttgctcagcagggcaacatcacagtcaagatcatcttggatggagtttcaaagctgagtccaaaccctagctgtaggggtccaagctgtgcartctgggagtgtgagcccccctgtgccatagcatttcatccagacaggagcagatggtggccaccgtccatgtgggcaaggagctcagcaccaggtgagcaccgtcatcccagcatgactggaaggcctgccaccctctgtcctgcctccctctcccggccacctgccaccctaccccmtgtacacctaggctctacctgaagagaccggctggacgtcaacccgttccccttcccctaagttgtgcgaccttagaaagctccttacgttctctgagatgaaagtcagtctctgtgaaacagagttgagaatatcaacctccccaggttgcagctgactgaggatgttctccgtgccttgctattagagagcaagggtggtgaatcctgtggggctgccctgccggaagcctcrcggaacctaaaacacactgaatggtttctttccgctccgcccagccttcccccatgatgcctcaccctgcgccctctccccgcagcgcagcgtctggccaggtaccaagaggcagactcggaggaggaggaggtggtgcccagagggggctcggtgtcccagcgcggcagcatcggcagccaccagagtgtccgggtggtgcacagaacccagagcaccaagtcccaccggcgcacgggcagccgggccgaggccaagagggccagcatgctgtccaagcacacggccttcagcagccccatggtgagtgtacagggcctcctgctagggtgctgccacgtctcttccccattttcaccatcccccgctcatggaaggtgtctatatttaatcctacaaatacactgtcgctgggcggcttggctctactcagcagaagcttttctggccaacactttctctccactgtcgtcttttccaagacactgacatggcccctttgcatggcttctaaggctggttgattgctggcaagtcacccagaaagggtgacaaagaggaagcccgtgctgccaaatgaagcaaataaaacctcaggacaagatgacaaccgctaaaaagcaaagccaacccctcccaagggagttttaattagacgagcccaaatccataaaatactttctgcctggccttgtcagccgcccagacattaatggaccaccatcatccagcacggagaggcgcagaagtgagcaataacctctgaaagagcctttcacttctgaaatgttttaccaatgcagcagaggggatgaatcccccttgcttactctgtggtggcctcattctctcatgtgcttctaaacccacagagaagctgccatctaaatagggctgatttcgagttttggacgctgattggtgggtttctacagggcccctgggagtgggggctctcacgcttggcaggagggaggctgcactggaacaaggtttcctgacagcatttttcagtatgagtcaagagtatttaaagtattcaaactttctcgtctagcaatttagcgattcagccaaggattgctacatatggaagtttatcaatgtgtaatttacatcagcaaaactgaaagaaatttaaatatccagtgataaagggatggtcaaataaatgatgacatatccattttcaagttgttaaaatgtgtttttaaataattcttaaaagcctggaaaagttcagacaataatgttttggagaaaatggaaaccaccaatatgtatataaaatattttgattatgtgaaatttaaatgtagagcgaaaagactagagggcaatgctgaagcatggttttcacaaagtggatagaagctctgtatattttgtgcaattaaaattgtaagtaatttacaattayaaaatgacatatatgtatatgagagatgaagttctgtttacagcttataataaaatcaaagtaccttaaatagtcacgccccaagatcctcggcaggctactgggtgggactcactgccagcctccctttctcccaggagaaggatatcaygcccgacccaaagctgctggagaaggtgagtgagtgtgacaagagcctagccgtggcgaggcatcaggagcacctgctggcccacctctcgcccgagctgtctgacgtctttgatttcttcatcgcactcaccatctgcaacacagtcgtcgtcacgtccccggatcagccacgaacaaaggcaagttctggagggtccctgagcttgaccttgaccttctgcgctgcgggccatggttgtcagtcctcctgagggcaggcgcccttccctttcctgcagcaagcgctcttggcacatcgtgacctaagggggatgcggtggggtgcttcatactgggcaaaacagtgcttgtggttctgcagcgttggccccaggctatagtgggcaggggctatgattggggccaagtgggagggggcagcccaccagagatgacttctgagcctgggaggggagggacacagggcagccagataggccagcctcaggtaggcaggtgggtgtgtggaggccctgcctgcctgggtccttccttcgctgcctggcctggggcagggccagagggaggctacccaggacaacctccccgagcctcagggtcccagatccacacaggagagaggacaagacaggccgggggcccagcttctgggacgaggagcttgcacatggaccctgactctaccagccatgcagctggagacacattggcctcctccctgtgcctggggtgcccgcctgggccgtggggccatggggaggatttatggggcatcgaagattgttcttcaatgaaaagcggtcgagaatcgatcagaggctacttaggacactggaaatatagcaatgctcaaattggttttggttcagtctgacattaaggttttctcctgagagaggaaaggttgcacgtgtgaaagctcctctatcacccagtgcaccccagaaagccctacagtgggctaggcagtgtagggggcacggaagcgtgatatgcatatggaaccaggcagttttgaatgttgaatggggtaggtgtgtgtcatagacctcccagcccccgactctcccaggatcccttcccagcctcctgggtctgcccttccagcaggtccctccgcaggcgatgtggggtgaacaaggtggcctgtattttctctgctgcagcagcatgtctggcagtacctggacccagtgactcccaagtggacaggcctgccactcagagaccagcaggcttgaggcttaggccggcagccctgggctggagctgcttcccgaagctgcagttcatctcctggctgcctcagcatctcccatctggcctctgggctctgcccccagcattaaaaacccttctggtgtatatccctgcaggaagtgccccttttctgggctagaccctgactgacagatgttaaatgaagrgtgagagatggcagcgtcattgaggcttgtgctgaaggttacacggcttgagttccacctagggaacagcctatcaatcacccacactcaggctgcaggtgaagatgtctctgggtgcatttctattcccacatattggttggtgagcgccaccttcgaggacatttggagccagcagggattgctgtgcaggtgcctatgtctcccagctggctatgtagcgtatttaaagtcataacaagaccaaaggaaaagcacctgtatcaaaatctggctctatgcaccttgctttaccaaacacctgatttttctggaggctgttactgtaattcacaacttaggatgcaatggtaaaattgcagttttaagaattgctaattcagtattttggttgttttgacatttgctctttcaataaagagcaagaaaaaagcgtggctctgttgccctatcattgagctttttgaaactttaacaattgtgtgtgtgtgtgtgtgtgtgtgtgtgtgtgtgtgtatatgtgtcattcattttgtttcttactgtggtggttaaaatattgtttcaatgtttgggatcctcaatttgtcagtgtatttaatgcgcttagaaggattatttggggactggaaatgtgatttgtatattaaatttttatagacataattcaaaggaagtataaactgatggtttgttaagtgactttttaattggaaaaaaaatgcccagttttgtgccaggcaatggtgagcctgctcccctgagctgtttttttgcaaagcaaggggacactgtagtgcagggacagccccaaaagaagcctgcagatgccaccagctgcaactcccctgcatacatccaggcctcactgatgggccctcggcaatcacgttctgaaagaatcttgcataacctttgtttaagagaagtggaagaggccagcggacgatctcaaggaaggagtactgtctctgcttgcaatttctttttttattattattattatactttaagaagttttatgatacatgtgcacaacatgtttattgcgacactattctgcttgcaatttcaatgcatgcctgaaatctgggaaatgggaaatctgtgctctgagaccccagtggggaagcgaggtcattgttcctccaagtgcctggagcatcctgtgggaaccagggtggggcctctgggggacatakcagttccctcacctgccttctgaccatttctcttgcaggtgagggtgaggtttgagctgaagtccccggtgaagacgatagaagacttcctgcggaggttcacacccagctgcctgacctcaggctgcagcagcatcgggagcctggccgccaacaagtccagccacaagttgggctccagcttcccgtccaccccgtccagcgacggcatgcttctcaggctggaggagaggctgggccagcccacctcggccatcgccagcaacggctacagcagccaggcggacaactgggcctcggagcttgctcaggagcaggagtcagagcgcgagctgcggtacgaggcggagagcccggatgaggccgcactggtgtatgcggccagagcctacaactgcgtgcttgtggagcggctgcacgaccaagtgtcagtggagctgccccacctgggcaggctcaccttcgagctcctgcacacactgggtttcgattccgtccgcaagaggatgtcagtggtgatccggcacccgcttaccgatgagatcaacgtctacaccaagggggccgactcagtggtcatggatctcctgcagccctgctcttcaggtactcccacccctgcccagctgyaccccagctcgggggaggaggtcctgagaaatatccccacccaattccttctcttgagtaaagtgattttcattaatccttttccaacagaaatgcccattggagaattgcatggtttcttcagatcagtgtttgcctgtttgaagggtttggactaggaagtattcaggggacttccatgcctgcacacccccacctccaagaactggggggtcagaggatacttgaagagtgtcacgttttaaatttgaacaatgaaggttgagaatctagactagtagctctagaaagttcttcctgccctgtggacctggtgcagcagagagatccaggccacagtttatggggctgccttgggccacagtgggggcccaggaagtaagggatgctggcctcccccactgccctctgttctggcacttgggaggggaagggccgagcccccctcataaagggaacctggccacccacctctccctctgtgctcagaggacggaggagtgcagcctcacctccagggaactgaactgggtggaggtgaggatgctgcaggagcctaggggccctgctgaggctctactgcctgccacgggcttcctatttgctgcaccttggaagtacctctgggcagcagctgctgggaaatgctataagccggttgctcccttctggagctccgagttggagctagggagtactttacctcccactggcctttcttgccagcatctcagtgcctcaggagaggacccctggcacagaagcccaggaccactcatgatggagaattggatgggaggaagagcttcatacaggaaatccatgtccccatcacagagctgtgacctccaaaaggcagctgagctaaatctgcaaatgtgtctctgagaggagtttggatgaccttccatgatgatgaccaccrcggggcgagatcttccctttctcccactgcagtggctctgccttggagtcagcaaagaatccaattcatggacacagtttgagttctaggaagcttcttctgaaaatcgattcttgtttacatccacacaaaagamaaacataaatagggcaattatctgagtgatttcattctacagcaaaaaaaaatctctctgtcttattccacagccttgggttcaagacaacataaggggtcctgggcttcagatttcacagcatgacgggtgatgtctaaggggaaggcatggagtggccctggcatgtgggggctgcccagcgctggcaggcgaggcctgtccagtcctgtagagcagggagccctgtgagctgtgcaaggaaggccgcagcacttgccgggcttgtctttgctggcaacatatttttttacatgagtaaaaacctcaaaagcagaacacacacaaaaagaactgctgtcactaagtctcactaataccatcagccatyatttcataaaagaaggaccacatttcacactccaccccgtcccccccaaaaaattaccaaggatatcccagaaaactggatgcctttcaattgaatgaatttagcgtcacgacctgctcactctcctactcctgcttttctggtaccttcccagagtggatagagcattatcaagaggcagggcccccctgcctgttcactagcaggtgccgagggccatggcaaaaggaacagtggtggcctggcctccagaggcccctgagtgagccagggatttcctcgtttgtctgcaagttgggaaggcacctgatgccggttacaagacaatccacaatgctctcctccgactcaaaatcaaactcacagtcggggtaggggagcccctgcccaggccggggagcctctcagacctggcatcgtcagcgtggctttgctctgggtctcaggaagggagcttcccataaccaggtaactgcagataagaaaaagaacctcaaatccatggcatcatggaagggccaggtaatgacattgtctcaactctcaccttatcaaaaccatgacattgataggaaaagttaatcaagggcttgtgttgatctccgccttcctctgggaatttccaagcagtgcatgaagtcagctttggatagggaagatctacgtgtcaacactgggcaggttaaggttcaggaagttcagagaccccagcagtttcccaagagaacgactacaggagggccctggagtcccctcgaagttacccacctgtgaccgcctgcccttatgcacagatcattcgccttttacttggggagcggtggaggggtgtggataggtgcasactcattgcagagggctcactgtgcctgggaatcgctctgcctgtgtaaatcaacttactacctgtgtgtaggtgacaaactgaggagggcacasaggtgtcccactccasacttaatctgatgcyctcttcagagggctcgaaacactttcaccagaagaggcccgagttggctgagcagatagtggatgtgactgtatgatatcagcaggatggggccatggctcacctgccctggcaggtgtggtgtcaggcaacaagcagggactccaccccaacccattctcacagatctctgttcaaatcccaggtctacacttacggctgggatgaccctggacgagtcactcactctttctgtgcctcagtttcccatctacaaaggaaatcacagtgcctgcctctcacgggaagtccccacatgagcccctagctcagtgcctgctgttacattgatgtccagcgtccactcggtacctttcccaagtctctggctccttcttgttaagatccacttgcttatgctttggtggcgttgctacttggagtggtctttaaggtgtaaacctcaggccactctgccttctcccagagcaaggacagagagatggccgtagcccactgcctagcgtgggcctcacacattgataccatgcagtaatcagtatatgttttttgcatgatgagtacatgcatgtacaagcagggactgcacgttagtttrccattttaataagataactccttattggggaaatatcgcttgtaaagcttagaagaaatggaaatatcacttggagcaattttaaagcacgtggtaaaatcatgaagagaggctaccctcatccctctgagggcctctctgtgggtctgcaagcaccactcgccagctgtctcctggtgggaacatcaggtgcagcccactgtcaggtgcagctgtctcggccctgctgtgtctggggtcagtgggcactggagtcatcttcgcagactgcacctggagctgtgccccttagcctcctgctcctgccccgacccagatgcagcctcagcgtcctgcagcacagagctctcgactgtccctgcccagcagggggcgcmgggcagcactggtcccactccctcaggtggtgtcactcctcacccgaggagctgagttccaggcacagaattcctcctgtcaccatagggagacaagacacacaggacttgggtggctgtggaacatcagaaagaaggggctaatattgcatgaccgttgcctaaaatgcagtgtgaaaattgccatgccttcagctcgaaatcagccacccccagcatcacttcagcaagtggagaagagcagggctgactgaatgcctctagggatccacactctgttccccagtacattctccttcggaggttcccccagctcctcggtgatggtctccttggagcttgagttcttcccatcctctcctaccccccatcagagtgtagaccgattccagcctccacaagggccccaccctccaaagcccagcctcggtattccgcagtgactgcccagtggtaggtgcggcaggacatgtaagggaaaagtcacccaagaacgaggggcagatctcgccagaaggggcacaggtgtgtgtccatgtctgcaggagaggacaacgggctcagccacttctgcctggcagggccaggtgctccctgtcactaggctctgtgcagatggccctgcaaagaaacaccccattgtccacctgagaagcagacacctgtggggccgtctcctcgtctggggcacccagggtcccgagtggcccatcctccctccctgggctcggttcattttgttttggagagtggttaatctcagtgtcacacccggtaccaccgcacgtcccagtgcacgccacatgtcacctctcaggacaatgggacagctttatcaagagtatttcaattccaaaacccctcagttaggcacggctttgctcgaggaacaatctgattctgggaaaaggttatctgcatcttctaagagtgttaccacgataccaggaatacaaagatgagtttgagcatcatcctttcgggaaatgtaaatacctaaagcaaaggattctagggcaactgtttttcttccccattatcaactccataaagagtcttttctgacttctttttcaattgtcccctcctggccttttaataacatagatatgctgtgtatctgtttatgttctatatgtgtacttagactttgtttagaaaagagtaagatttttccacctccaagaaccagtgatcactcccttgagggctctgtcacccctgtggagaatgcagcacgrtcaggcatgtaaaagggtctcttaccgggtcctctttcaggtggtggacttagattagtagataatccttcctgggccacgggcctcatgactggtcagtagtgttgccagatttcacaaactgtatatatagaatgtccagttaaacttgaatttcagacaaacaaatccttttttaagtaaaagtatgtcctatgccatwtttagacatcgtttgttgtatctggcaatgctacttgtaaggatcctactcttctgaggatagaaagtgcacttcccattaagtaagaattttcattaacaggaagaacgtgagcctccatttaataggctgggcaaaaggatgccaaatgacttttgatgtagtttttattttcatgagcttatttcaacaaaggatgttaaaaacagccaaacatcagcagggcgcagtggctcacatctgtaatcccagtactttcggaggccgaggcgggtggatgatttgagtccaggagttcgtgaccagcctgggcaacgtggcaaaaccctgtctctataaaaaaataaaataaaacagtcaaacatttgcatattgatgagactcttttttaaaacataacagctcatttttgctttgaattctatatgaaaatttgtgctctattcgcaagtaacgaacagacgtggggtaaatctcggagtgtctgaagaccattccacaggcgccagttcttacccatgtttctgcttattctccaacctagttgacrccagagggaggcatcaaaaaaagattcggagcaaaactcagaattacctcaacgtgtatgcggcggaaggcctgcgcaccttgtgcatcgccaagagagtgagtgggggtgtctccgcgagggtgcacgtgcaggtggccgccccacagtgagcagcgcccggtgcagcactcaacaatgtatctcccataggttctgagtaaagaagagtatgcctgctggttgcaaagccacctagaagccgaatcctccctggaaaacagcgaggagctcctcttccagtctgccattcgcctggagaccaacctgcacttgttaggtaattaacttgagagtcgcatgcctaagggcagtgtggagtttgcagggacggycctggaggggtgagtgctcttgtcagcggctgctccgcaggctggccttggttagggagccacctggcaggacgctggcacagccgaggcgggagggtgcttgcctgaatcttctcctagtctcatttctgtgaggtgcacgtgctgccccccaggcaccccaagacagcagctgccaygcttccccttaacctggtttcccaccaaaaatagagccaaggagtgagatttctgacagttgggagttgaaaggattttcccctcgggaaacagggaaacttttgggacccagaaactgctgcattttgcatcttaggaatgtttcacagattcgaggtgaatgaaaagaaaatgggctcatttttactgaaatatgtccacatttccagctgtgttcatcttggtacttaataaatgctaactagtattagtgataaatgaaggtatttattatgttaatgcttactttaatacttaaaatatttattttcctatttattaaagcattcattaaatagccaagtcattgtatacatgctctgtgtgtccttgaagagctggtgttgaggatggtccacccccacctccatctcgggtgctgtgagtcaggtggtacttctcgagcacaaagccctgggcaggtcatcttcacttaacacaaaaaggcggtgttcacttgccctctttttctgggcagaggagttgggatagctatatatttacatctacatttctagtataatacatagttaaggtttgcatttaatagcataatgtacactaggcataacatatatctgcacacattttatatattgtttgcccacagaatcttataggaggccacrcattacttggaaagccccgggatccaggggcccagtggcaccatgagtggcagccctggatgtgaattaaatggaacacctgagaaatggctgtgcctgttttaggccctgaagttttggcttactaaagcagggctgctgtcgtctggactgattgggcttccccggaagacagtattgtgcaggcctgtggggtaggaggcatctgctggttgtcccagacgtgcccgcccagcctcattgaccaggcttgtttttaacccttcactgtggggcaccttccccagggagcagcttttcccctggacagcactaacttstcaaatggagtgaaattggccctccggtgccatttcacagtgcttgctggttccgccccctggagtaatgcagacagaatctcctcccttttccacatgatgaaaccttgactatttggggacatggctgtgagtcccaggctgccccttctccatcttccctgctctcagagcccagragccctgactcagttgtccagccctgctctgccactgcaagctggtcatgcgggctggtcatgcaggctgatcggacagcctggggcaagtggctcaatcctttttgcatccaagttcygctctgtggtaatcccagtgtttygggctcttgtgagggtgaaaggaagggatgacggggggcactgagcgtggcgcaggcacagggcctggcactgagcggttgtgtggtgagtctcctggttggtgcttccacaccgtttccacccagctggcctctcctctgcaggctttctctggtgatcgtgcatcggtcacctctcttggcccggatgctgcagctctgttaacatatcctaagttgttaacggcccctgcggcacccgaggctcatggttaacttgagttccagtcatcttcttaggcctttttcacagggattccttgcttggattctataatttttacttgggcaactgtgtgaagatctaaaatcagagttgtctaccgatcccctgttccacttcctctgattggagtcgggatcccggtcatcagcgtttctccaaactgattccaccacatccygctgtcatcctcaggtggattccttccctccaggtgcacgtgaggatggctctgagatgtgtcagcgatggaactcctgggttgcccacatgggtgccagccgtgcactggagcctgctcacgcctcctggcagagctcatggatacattttgaagaattttgcagtagcccacataaatgttcaggaatctcacgtcgccttttgatgctatgttagtagattgaagtcagccaaggtgggagtatttataccacagaaatgagcaaatgcagtaaatcgaccttcctcccacagaccggttgttaaccacttrccatctcctgctacctgatatgtttatgtttcaaatgacgaggcctgagctggagagtatgggagccacccaccaccttagcgttcacatggctcaaacgcgggcactgtgttccagctcctcagcttcattaagaaaagtgaagccagccacttatatttttactattccaaagccaaatcttttcatgaaggtgcttttttttgttttttttttttgttttttttttttgctttgagacagagtctcactctgtcacctgggctggagtgcaatggtgcgatcacagcacattgtgagctcaaatttctgggctctagtgatcctcccgcctcagcctcctgagtagctgggaccacaggcgtgtgccaccaggcccagwtaaatttttacttttttttggtagagacagggtctcactcaggcttgtctcaaactcytggtttaacgtgatcctcctgcctcagtctgtctaagtgctgggattacaggcgtgtgcccctgcaccaggcccaggtgcttatcttaaatagcatcagagaaccatacataactatcttcagcagaaaggatctccgttctctccatgctcttgaaattttcttttccttaatgctctgggcaggaacctaaattcaaaggatactcttgctcattttccccggcgtccttgctagtttctctaaatgtctaaaacttcctcgttggtgaaatcctttcccctcccattcaaagctgtgtggcaccaagcacagtgacgctgggctctgcacaccaccaactcctgagttatgatactcagaaatgccaggccttccagagggtcaggtcgtaaagacagtggcatttactcagagtcacataaattatatcacaaacaagtaccttggaaagctgaagaaagccgctgtgccccaaatcatcttgaaaggctgctgcctgcaggtactctttcctctgccatgtttcatgccgaggtgggggtccctcccataactcctttttcagttcaatgctattctgcacctgactcaggctcacaccttataaaggtgagtgttggtggggtgacccagtgggaggcccatgagtttgaccaaatagctcctgaactaaggaggttctgttttcaaggtgttaacttttccctgtgaaacagcagacaccctccgtactggagtttccggcaaggccttccctgctttctttcttggcagacatttgactgagggactttagctcagcagctgggatacaaaggtgggaggcacaaggtccttgaggcaggaagttgccatttagagaagagtgggcaactgcttgggttatgtttcaagcactgtagtggaagcgttatcctggcaaattgtcagtaatccatcaaggttagccattattagtcttactctataatcattattactatcattaagtatgaatgaattactatgaacacacagaggaaggcaagaccatccctgtcttccccagacatcaaggaacctgtcatagtacaagtgacactcaggatgagccagggacacgggccacacacagtctgcccccctactagagcccaagggccagggtagaggagcaaagctaaggtcagatgccctcccggtgcccgggtggctggggatgtgctcacggggagcacagagcgtgacctggctttcttcctgagcaggtcttaagctccacacgctgtgtggtcttcccagggtactcaggttataaggttcagagcagtgtgcagcatgggtgcaatgttccctcctcctttctgggccctccccaagttcccacatcaccttccagtacatccccgacatgggagctaggcccaggctacctgagctggaagacagcagatcagccacttgcccctgagggggtcttctggggtgctggtgatgttctgccccctaagttcagggctggtgacactggtatgtgacttgtgaaagtgtatcaaaggaatatttaagaaatgtacacttgtgtgtttactgtacctcagttctaccttcccctccccatgcctgccatcccatcattctagaagaaggggtaagggtggcttagttcgtttgttctgctgtcacacaataccacagactggggacttaagccacagacatttacttcttagagttttgaaggctaaaagtccaagatcaaggctctaacagctcacaatgtctggtgtgggatctcctcctggtttgcagatggctgcctccttgcagtgttctcacacaatggggagattgagaaatcacctttccaatgcctatttatttatttatttcttgagacagagtctcgctctgtcacccaggctggagtgcagtggcatgatctcagctcactgcaacctccacctcctgggttcaagcaattctgcctcaacctcccgagcagctgggattacaggcacccactaccacgcccaggtaatttttgtatttttagtagaaacagggtttcaccacattgaccaggttggtctggaactcctgacctcaagtgacccgcccgccacggcctcccgaagtgctgggattacaggcgtgagccaccgcgcccgaccccagtgcctctttttataaggacactgatcccatcgmgggagccccatcctcatgacctcatctgaacttaattacctcctgcaggccccacatcctaatactaccacactggggattagtgctccctcctatggatctgggggacacaaacgctcagtccatagcagcatcccagcacagggcacagcatggtgtagcgcagtaaaggagcctcagtcagggctcgaacctagggaccrgggctgcagctcacttccagagtggggaagacagaaaccatctcaccaagatgtaaacagatcttaaaaaaaaaaaaaaaaatctgaggcaggcctaagcacatttccgcagtcaatagtagatttttcccaacatactgagaccaaaaaggcaaaacctgcctctcaacttctttatgtttgtggaaaaagcatatttaggataatcttggtttcaagaaataatggccttacctgtgaagtctgtttctatagtgactagtaataagcattgttgagactggacattctgaatttcattcaccagaagctttctatgggatgggcaatttttaagactrtatttttatccctccgaatatcgtcattcccaacaccttcccatacgctttgccttcaggttatctgtaaagttacaagttagaaagaagttgaggtactttggtgtaagtacacataattatgctcagtgactcacagttattcctacgcactcgactgagtcacatcgacagagctgtcaaaagcgtccaccactgtcctgaaatggttccacaggggacttcctgtcactacatggcagacaactggcagcccagcccctggcaaggcccaggcaacaggggctgtaccagtgcctgccttcggtgtatctggtgcatgacatttgcaccccagaaggattggggggcacgtgagaagcgggttsgctcacactgctgtgcatttgaccaggtgccactgggattgaagaccgcctgcaggacggagtccctgaaactatttctaaattgcgtcaagcgggcctgcagatttgggttctcactggtgacaaacaagaaacagctgtcaacattgcatatgcctgcaaactgctggaccacgacgaggaggtcatcaccctgaatgccacctcccaggtaggtgggtttcaagtggctccgcttccttcccctggggtggtccatgtttatcgtggcccccttggcagacactcacattcctggcagctgctgtkagaaggacctcaccctccgcattcgggtttaggatgtgcatgttattgccttggaagaggtaaagtttgctggaatttcttagtaccaaaggaatgcatgtctgggctttattgatacaaagttcagcctggtttctcctgacatactgtccaagtcatcaaagaactttctcgtgaggtcccmtgtgcttccacagtggagccagggcagtggtccatttagcactgaccacctcaggatcattgcaggcactgaggacttctttatccagttggatttgtctgtttaaatccccaagtctgtggcgagtagctacttcatatactgccctggtctgggctctgagtcctcgcagaagttcccactcaaaacttcttgcrccggctttcaggcttcttgaatggagcagggaactgtcttgctgtggctgatctgctcctccccagtgtggccaaagccaccacagcctctctggggctcacactcagactccccaccccagcccctcttaggtccacacctgcaccatcagctatcaggaccttgggactttgtcgcttgggagtccccctttctgagatggccttggtgggagcattcctgctctgtgagttattgcagcagcccccactcatctcctggcctctaggacctctcactccatctgtaagcgtaggaaaggctgcctttcaagccccgttgtccacattgtacagacgccattgtgaccctcgcaccttgttccattggattctatgatccagattcccaccattcccagtcctttcttcacagccacgctggccggggcacccccttcctctcacatctatgcaaggtcaccctgcttcagagcctgtgccttcaccagggccttttttttttttaagtgacctctttctccaagaaagtttgcgaatttatactaaaggttgacctgatgacctggtcattgcttttatttatttatytataattagcatatagtaaaattggctctttttttggttatacacttacatgaattttaacacgtgcatagatctgtatatgtatatacaccaccctatccacggtccaggagagttccatcatccccagaaagtctgccatgctaccccygtgcaattgtaacttccctccttttctaacctctggaagccaccaatctgttctccagaactacagttttgtcttttccagatgtcaagtaaacagaatactccagtgtgtaactttcagagcctggcttctgtcactcagcataacacttttgagattcacctgarctgttgcatgaaccagtagtatatttctccttgatgctgagtaatatccactaacaccagattttgcatatccattcaatcagtgaagaacattttagttgtttctggttgttgacaatcataaacagcacttctataaatgtgtgtatacaggtttttgtgtgaacatgttttcatttctttaaatacctaggttagatgtgaatgtgtctaagtttataagaagctgccagacaccagcctgcttttcaaagtgctgtattactttgctcagtgtcttttccagcacttcgcattgtcattgattttttttctgctagcccctctaatgggtgtgtagtggtatcttgttatggttttaatttgcatttcactagtgtctaatgaagttgaacatctttccatgtgcttattttccattcaaatatcctcttggatgaattgtcaagtatttttccattttctaattgagttgttttcttaatgttcagttttgagaattctttatgttttctgtatgtaagtcctttgttggctatgtgatttgcatatatttcatccctatcttctttattttttaatattgtctttcacaaaagcttttagttttgataaatttttattcttgttaaatttttattttattattttatctttttggagatgaggtctcactctgttatccaggctggagtgcagtggtgccatcgcaactcattacagcctcaacctcccaggctcaagggatcctcctgcctcagcatccctagtacctgggaccacaggagcgcacaagcatacctggctaattttttatttttttaagagatgggatgccccagcgttgcccaggctggtgtcaaaatcctgaactcaagtgattgtcctgcctcggcctctcaaagtgctgagattatagacttgagccactgtgcctggtctgattggtcattttttttaaattttatgtatcatgcatttggtgtcatgtctaagatgtgcctaattatgaatattttctcctgtgttttattctaaaagcattacacgttaacatcttatctatagatacagtccattttgggtcacatttcatgaaaggtgtgagggttaggttagacttcatctttccacatgtggctgcccagttcctccagtgccatttgttgaaagcgtcttcttttggttgaaagcrtctttgtcaaaaatcagttagttacatttgtgtgggtctgtttctagactttctgttctgttccattcatttgtttgtctatcccttcaccaatacgacgtgtattgattcattgtagtagtttgattactgtagttttttataagtcttaaaaattggtagtgttattcctccaactttattctatttcaaaattgttttggctagtcttcttatttgttgccttcgtatatgaattttaaattaatttttctgttcagaaattcctgctggagcttttatttgaattttgttaaatttataaatcartttgggaagcattgatatttttattatgttgatcttccactctgtaaacatggtatatctctacattttttaggtcttcttttatttcttttatcagcattttatagttttcagcatacacatcatatacatgttttgttagatacatacccaagcactgatgctcctcaacttatgatggggttatgtcccaataaacctatcataggtcaaaaaaatcataagttgaaaatgtatttaataccccaaaagacccatccaaaagttgaaaatttgtaaattgaaccattgtaagtcagggaccatctgtacaacattttttgtaggttttgtaagtagtatttttaaatttttattttccatcagtttatagtacagttgacccttgaacacgtaggggttagggataccaatccctccatgtagtcaaaaatccacatataacttttgactctccaaaaacttgactattcatagcctactgttgaccagaagccttactgataacaaatagtcaattaccacctattctgtatattgtatgtattatatgctgtattcttacaataaagtaagctagagaaaagaaaatgttatcaagaaaatcttaaggaagagaaaatatatttactattcattaagtgaaagcggatcttcactgactctttccttggtcgtgtctattctcccattgagcccatccagagagttttcaaaaataaactttatatatagaattgtttcaaatttagagaaaaactgtgaggatagtacagacttatttctcatgtatgccatacataatttattgttactgatcttacattagcctagtacatttatcacattaaggagccaatgttgatacatcattactttctgaagttcatacattgccttagtttttacctagtgtcctttttttgttctgggatcccatccagaacactacattacattttgtcatcatgcctccttacactcttcttggctgtgacacttcggtaaactttctttatttttaatcattttgaccattttgaagagtgctggccaggtattttgtagaatgcccttatattgggatttgtctgatgtttttcttatcactaaagtggagctaagggttttagggaggacagccacagaggtcaagtgccattttcatcatatcctatcaagggtacatgctgtcaacaccatgtcactgttggggttgacctttcagtcactgtactctttgcctcttcccatactgaattcttccgaaggaagtcactgtgcacagctcacagttaaggagtgtggagttatagttttctccttgagggcagagtatctacatagatgatttaraatccagtgagctttttatttcagttaatgtatttctgtcacaaatttctatttggttctctgaaatatcttccttctttttggccaagactgtctgtctctctgttcatttccagcatgttcaatcttacttcttggaacttttggwtaatggctgttttcgtctttctttgtcsataatgtcagtatctgtgtcatcttgacattggcttctgtggattgtctttttccacagagttaagattttcctggttctttgtatgctaagaagttttggattgtatcatgggcatttcgaatattatgttatgacactggccatttttaatttctatggagaatgtggattttttttaagcaggtgatcaaccctgtggggtttgggctgtgagctctgggtgttggtttcaaaggcagatgtgtttataagacctagtcttgcatttttgccctccagaggtcaccttggaacttgggtggcagtctgttgcagagtttgcctctcaaaggctttgttatgggtgagcccaggaattcattaacaacattatggggtcagttagccaagcttctctttacaatttttccagcgcctctggttccccaagaatccccttttcagtcttctggcaggaaagctggagtgtgtcaccttcttcttcccatatttcctgcccttctcctgcatccagcgccaagtgggggcagaatagaagacagagcaccacaggctctgttggaaaggagggtctagctcccttggagtctgcggcagcagacatttctgccactgccattcctgcatagccacggtagcagaattgcctgggactgagttcaaaataatagacgaaaaagaataaataaaattggagacttcctcatcttctcagagcactgggaacccccttttcactcctcaagmcagagctagaaggtatctcctggagctctctctgtcattgccttggagcccacgtccaggttccctggtgccttgggctaagccaggggctaccagagtgacagtgacatacccaccacccattcagtgtccttagcacacttgtctcctctcccggtccatcggctgctactccctctcagagctctgcagtaatgagcctatgcgtcctgcccaagtgccgcctgaagtcagtgggagcaacgggatgaaggaggagtctccactgctgtgggagtccagggagctcatggagttcctgtgatggcatcctgcattctcctcaaggccttccccagttactgccatatcccaccccatgccctggaagcaaagctctccctctcctatccatctccacactttcgcacatcctggttggtgatttgctgcasccatgagtgtgtgtgcatcagctgtctgttccccctacggcagtaactgtgtcttttcagtcttcttttctctagtctggcttcattttctgaatacaaaggatcctcagtaagcgtgtgttgaacacagctggatttccgtggtgtgttgcagggcactggtcactgacccagcagactcacggtctgcggaggatcaggagctgcccaggctccccggagcgtgtttgttcctggagacggtggtccctcctgtgcctccagctcctgcccctgatccctagtgctgctaccaccgtaggttttcctcctttctctggaatccagatcaagttttgcctattaaaagcctccgtaattgtgcttttttttttttcttttcctggcagaattggagaacttagggaggatactgaaaattgcatttctttaggggctaatcataacaaagccttttgcagagctttgtgtcctgcagttagtccttggggggttaggtaagggcctctgagaactatcaagaagtacatggagggccttcagtctaactatccagcaatttcacaataatacagtatggcctcccaaagtgaagatggtccattccaacctctgcactgtatcatgggtgatcaagtaagatcttagagaaacctagaccagttcagtctcttttttttgagacagagtctcgctctgtcgcctaggctggagtgcagtggcatgatcttggctcactgcaagctccgcctcccaggttcatgccattctcctgcctcagcctcccgagtagctgggactacaggcacccaccaccacgcctggctaatttttttgtatttttagtagagacggggtttcaccgtgttagccaggatggtcttgatctcctgacctcgtgatccacccgcctcggcctcccaaagtgctgggattacaggagtgagccacccacggtgcctggccaccaattcagtctcttctctggggaaagtcatcctctccggctgaacttcacagtttctggagggtggcctctgggcaggcgggtactgcagcctggagcccggaaggatgtcagctccagaggtgttgagccagggcggggatgtttgtggcatgactctgagggaactgcgctgtcctctcatgtccctttcaggaggcgtgtgcagccctgctagaccagtgcctatgctacgtgcagtccagaggcctccagagagcccctgagaagaccaagggcaaagtgagcatgaggttctcctctctctgcccaccctccacgtccactgcctctggccgcagacccagcctcgtgatcgatgggagaagcctggcctacgctctcgagaaaaacctggaggacaaattcctcttccttgccaagcagtgccgctccgtcctctgctgtcggtcgacgcctctgcagaagagcatggtggtgaagctggtgcggagcaagctcaaggccatgaccctggccataggcaagtatcccagctggccagacggcctcctcccagctggacccaaacttcctctacccttccatgctacaccacgagatgggaaaacacttcctcacctttctttctgtgtgtaaaatcacacccagtgtgatagagcaggcaacatgttccgaaggtaaagtttacattggaaagccacaaaagagagtagcagagttacaggttcatgctgcaaggtcagtaatccggtgctgctttacggcaacaagatggagcttaccctgtttctcaggagacaggacacaagagacctgcctgtcccagtctgtcctggccacagcagagggcactacacactcagccttagcccaggccaacttagaaggtcctttgcagctgcttctggtcaccatgagcctccgggtgtccaaggctttgtaacgccctaagggcccagaggcttggtgaccagaattcccactgcctcctgtcagctgtgctgatggttctgggacaggcttctgagtaaataagtccatcatcagatacgcatcactgctcagttttacaccagttatttaaggactgtgtttctcatggtggtttttcctggcagacactgttggcctggagagccctgtctgctcctctccagggaggggatggtggccactcgcctccttccaggacatcctctctgcccacttctagtgcaggcagagtctctagcacaggttcaggggctcagcagcaccacctcctggtgagggccaggaaggaagcagtggccgtgacccccacatgccaacaattgggcctccctgtaaatagaatctactcctaggtgagaactggatcagaaatcaagtaccctcgccaatcaatcagccagtgttggcagtattttctgcaaaaggtctgtgacagcccctgcttgttgacatggagattgctgcctgttcacagtgggcacctcacctggccagaggagaccgctgttgagcctgggttacagtggcagtgaggagagcgagcactggcctgaacacggtcgtcatggggaccctgccctacacaccctgaggccagtaaccgctaaggagagtgggcacagggcacgtgttcaggaggcccggggaacctaacagccatggcctgtcctgaggccatctttgccttcatgtgcctggggtggccctcaggtttccctgaggagctggaaacggtcttcaggctgacctgcaccacccctgtcccagcctcctcctctgagcgtcagtgtcctccctgggagcacgaggacaacgtcagccctgaaaggccacagtacacagtaagacgtgaatgatgtttccctggcctggccagtgcctgsctcagccgcgtagccactggtgtctggtattcctgaagaagtggaaggaaatccttggcagattaaaaagaaaaggaaacacagaatggaatctcaaaagaaaacgggaaagtaatgacccataagaacatcagcacatggctgggcacgtggttcacaccagtcatctcaacagtttgggaggccaaggcaggaagatcacttgagcccgggagtttgagaccagcctgggcaacatagtgagtccccatctctacaaaaaataaaaaaaattagctgtgtgtggtggcrcacacctgcagtctcagctacttgagaggctgaggtgggaggctcacctgagcccaggaggtcaaggctgcagtgaaccgtgatcacaccactacactccagcctaggcaatagagtgagagaccctgtctcaaaaaaagaaaaaaaaaactgctggggcaacatggtgggcgaaaccccatctgtactaaaaatgcaaaacctggctgggtgtggtggcatgtacctgtagtcctacctactcaggaggctgaagtgggaggatcacttgagcccaggaggttgaggctgcagtgagccatgatcatgccactgcactcccacctagcctgggtgacagagtgagaccctgtctcaaaagaaaaagaaagaaagaaagaatgcgttaaagcatcaatgtgacctactcctagtgcccagtggtttataatgtagagagcatcgttgcataccatatctcatgttttaccgtatctcattttaaatgggacattctggggaaagctgtacagatttttattgcttcagagaattccaatttgatatatattaactgatcagttaatattggtctcaacattataaagaacaggaaaatcacagggaagagacatcctgtagtcacactacaagtcattctaactttgtgtatctgcaccttttctcatttgtgcaacttgggatgtatgccctgatttgggctcttctgctgcccagttccaagaatggtgaccgtcacggagtgataacaactttatgactctgctgtcctttccccgaaggtgtccagatatctgaccatgctctgtgttcctaaacattttctatcaacaaattgacagaatgaagagaagttctcctttattgcacccctagagggccccaaagtgagcacaatggctaatactgtggcaatccatatgcaaaaaaaagagctccacaacgtgctgggctgaatttaacctccttcccttagtttagaaactgcccgggaagtgtggctgggagtagccttggctgcttggctggagtggytcagtaactaatgatgatgaagatgatgatagcatctttccttgtgccagacagcaggatgagggttttactggtgtaagagcggcactgcagagcaggcgccatgtaccaggtggctcagctccagcccgmtttccgaaacatctcctggtgtcgctagcttattctgaatgcttaactctattctcccagggtggatgctctactcctttttcccccatcttccccaggacgctttcacaggactgmgttcagcggggactcccaagaaaatctarcacattgatttgattctgtgctgtttctagaatcaaacaattcttcttgcctgtgctgtttctaggtgatggagccaatgatgtcagcatgatccaggtggcagatgtgggtgtgggaatctccggccaggagggtatgcaggtaaagaccaatcaggctattctgtgtgaccaattggccctactgacctcttgtcctgtcaccctgtgggctgtccccgacttcctctgggctctactgaacgaggctaaagggtttgcccttaatatagctgatgctcaatacagctgctaagccactagtggaaggtaaggaggaatgccattcttcctgtttatgaagcagtgtgcaataagcatgtcttcccatgtcacaagtctatttttgtgaaataagtggttcagagagaggcaaggtgagtcatcgccttctgtctggctttcgatggctcrgtcccagcaggcactttttactgtccgtgaacacggagcaataccatttgaaaaaatgcctttgatgtaggtggagcctggcgtcactgtacaggtggaatgtagccatcctcactcacatggaagttcacctctgcatctttcctctgccactgtgttcactctcggtctgggagtcagacattgaacaaatgacttaactaaaaatgtgctgcttttggatttagtattacaacagtttccaacatttgattaagtatgaatcacaacatttttgggttggtggagattttagggaacaatttatccgaagttctaaaaaccaggatgttgataccacttactcgctggttgattcatttgctgactcagtggttcgatcagtaatgatctgttgggcatgtgctacatgtcaggcctgtgcagagctcattaatagttttagctgatgttccaccctcagatggagggtcccaagctagatgcacagtagttccgtcacggctggtccttgacacttgccttactccccccgccgtcatctgactggaatctccgtgttacgttactcgcacattttttcttcctccagaaaattgaaaatggtgttcatgtttgactcacctttgtgtcttcacagtgcccagtgtggcaccttgcacaaggggaagctcaagaaacatttgctaagtaaatgtacaaaatacagtggacccttgaacaacacgggtctgaactgtttgagtccacttatatggggacatttttcaataaatatttggaaaattttttggagatttgtgacaatttgaaaaaacttgcagatgaaccacatagcctagaaatatcgaaaaaattaaagcgggccaggcatggtggttcacacctgtaatttcagtactttggaaggacaagacaggaggatcaccrgaggccaggagtttgagaccagcggggcaatgtggtgaaaccccatctctactaaaaatgcaaaaaccccagcgtggtggcccatgcctgtagtcccagctacttagggggctgaggcaggaagatcacttgagcctgggaggttgagcctgaagtgaactatgattgcaccactgcactcaagcttgggcaatacaatgagacccagtctctctttttttttttttttttttaaaaaaaggaaaaaaaattaaggaaaacgtaggtgtgtcatgaatatgtgaaatacatgtagattccattgtgcgtgtttatcaactgtttrtgtgatcagtaaggcttcccatcaaccgtaggctattagtagttaagttttgagggagtcagaaattgtatgtggattttcgactgttcgggggaacccctaactccagtgttgttcaagggtcaactatagttcattcattctgactttgttggcattgcttctgttttcactgtttcctctactgaaaatctgatgggggcagtgcctattgacctcatatgcttggaaactcgtctagtaaacatcttttggatcaaacacttgaatgttgagcatgtggctggggaggggccggagctgccatgcctgctctcctcctcaaggtgggagcaccagcccaagccctggggctctacatgcaaggtgatgggaacagctgagccatagggcaggtgcccagagatgcagctttgaacaggcgtagctgctggggaggaggttgctgggcacttctgcacatatgtaaagctgtgcatcctccctggggatgtgttaggtgagatggggacgaggcttgatacctttccttaccatcctatgcacttgggttttccagcactgggaccctgttgcttgcattttagtcagtccctgctgagccctttgagagatgagctgtgggttgctgagggagagggatgccagagatgtcagagctgagccgtggaggatcaggcaggaggagcaggcactccccagctcagccaaggtggggagactgccccaggcagggggcaagaggaacaaaggagatcccacagctcctgggaagttctgtcttcgtgagctctggctcatctggttcaccctatttgtcctgcaccctctagagccaaggctgactgggagccagggatacaaggtgaccccaacatctctgatcctgctctcctagaattcccagaaaagctgggaggctttggaaaggccactttgacggaaggacaagcattgtatttgaggcctggatttaggggaggaaggagctgcagaaggctggcaagccaggcgtcctcagaggggtttgactgtggttctcaagggcgggggtttcttcttcaaaggcagcctagagtttggccttgtaggccatcagcctctttttaacactggtcccttttgactgagcttttcagactgattctgtggaggacggggactgtgtctaatggtatctgtttctccaagtctgtggctggcaatagtggagtcttaataaatgatttttgagagaatgaatcatggggttaatgggtaaagcattacagaacacgaaaaaccttttaagcccctatgtgttgacagcaagaggtagagggacatttgctttgaaatccttaacttttggttcagaaaattgatgttctaaggttttgtgtatcatgacactattccatttcaagcgtaccacttgaggcataacttactgctttctacatattatttgaatatagggaaaccagttagatgttaaaggcaggttggcattctgtttagaataaccttctgttgataagcagaaatctagcttttcctgccactttgtttgatttttttttccaaagacatttattgtacagtgggtttcaaattattctggggacaaaaggtatcattttgatggtgttttccagcctagttggcttcactgcgtaagcaccttgcttgatgatatgcaggggaagcttccatggcaggctcctgcctgtccatggaggaaacgtcttctccactccctcctgcacacggccactgcccgcacccggcgtcctgggttgggagtatgtgggaggccagtggagctgtgggcctggctttgcccatcaccaaggcttctggggggaacagcccaaaatgcacctcccaggacaggggaatgtctgtctctgatacatacggcaggagcagctttgggtcatccttgggttgtgaccatggaccgatttagaggaaaatgacatccggggcaaagaaaggcagataaacaccatgtatctctgtgtgttttcatttgttgagaaaacagcaggaaaaaagaaaaccttttaaaccccattagtgacacatatttgaaagcgtaaatgaatcttataaggtgacatccctgaactagcgtgttgggtgagattgcctcttttgtaacggaaggagatgctgagggagacgacagcgatggagaccctggccggccacgctcrcactgtgttcagaatggggattttccttccctgttgtgtaccttgcattttgagaagagaagacaaatctgacgccaggtcggcatcaccagtaacaggaatcmctctccctttgaaggcagtgatggccagcgactttgcagtgccgaaattccgatacctggagaggctcttgattcttcacgggcattggtgctactcccgacttgccaacatggtgctgtacttcttctacaaaaacacagtaggtattggatacctgtctagagttttgggattggaaggttcggttcttaggaccatcgcctgaatgaggaaggaggatggagcagatgggaggccatggacaacctgctccatcctccttcgcctgtgtaattgtcccctgtcctgggctggctctgcactctgtaggctcagagtctaattcaggggcatgagagcagctgcawctctagggagaggtggtggaaacaggtggataacactagcaagtccactgatggctgcagagtgagaaggggcataattatgaggctagcagtttgcacaggggcacacagctggtaaaccttcaaggctgcgttcaccccaggccacccagtcctgctcccaggctcctaacsactctgtccataggtttctcaggagcatgctgctgaaatatccccaaacaggagtcctctaatcagcattttctctagagtagacggaaaatccaatgataagcacaagtgtgctttgtggtctgggatcagaataagggaacttagcctcactctgattcccatactgaatggcctctgttgggacacacccacaccaggacaggtgacaggcggcaagcccctaggtcagggaggctcagacccagcaggaagggggtgcccttcgggccttcccaccctctcccacctcccaggcttgcagagcagacacacccctctcggatgagctcattctgtagctaaagtgaccctgctgtaaagccacacccagggcagattggctgcagacatttctgtctctctgagggttctgcatggtcatttcatgtggatcttcacgttggactcttcgttccttcttcactgcttctttggcagatgggctcctccatagccctgcaggatggaccacatggccgtctcagagttctgccccatttgtaagagatttctagatattttactgaggagttgctaggctgctgctgcttttggctgaatgtacaaacaaagagacaaaataaactcttagggtaagtgatcttccaaggtagtcccataaatctacctggctaaacaccagaactccagtgtcaagattatcctatactcttctgaaaataaaataaaataaaaggtgtattctttttccagttctgtataaaaactctccagttagctagctctaaactgtcagtggttgttcatgttcattttatttttattttttgagacagggtgtcactattgtctcccaggctggagtgcagtggcaccatcatagcttactgcagcctcaacttcctgggctcaagtgatcttccagcctcagcctcccaagcagctgggactacaggtgcgtgtcaccacgcacatctaatttttttttttttttaattttgtagaggcagggtctcactttgttgctcaggctggttctccatgttcttaattgtttttctggaggctacacctgcctttcttttcccaacctctctttccccttcacactcacccccttcatttttcggagcgtcttctagcaaatgcatacagctgctcagatccagtcagggcatgtttaacttgataggtttggtcccagacattaattcagattaggctgtgcctgggactatctgaggaaggctgtgtcacaccactcctgggcttgccggctcatacctcctttctcccagccctggcattaaatccccagaactttgaggcctcaagtgcacagttgtaagcctaaaggttctcagctcccgaaggagtggagggatgaatgggggtgggcagggaagaatccaagccccctttctatcacttgttagctgtgggttctygagcaagttaattcctgctttggatttttttttttttttttttaaagacagggtctgattctgttgcccaggttggagtgcagtggcgccactmtagcttactgtatcctcaaactcctaggctcaagcaatccccctacctcagcctcctgagtagctgggactacaggccaccatgcccagctaattttttctattttgtagagacagggtgtcgctatgttgcccaggctggtgtcaaactcctggcctcaagctatcgtcccatctctgcctcccmaagtgtggtattataggcatgaaccaccatgtccagtcttcttttaaatcttaaaaaaacaaagcaaagcctgtgagttgagccagctgatccctaattcccagttaaaatgtctcagatcgaagggagggcaagaatgatgtaggccaaatcattaaacacttcagatgcaaacaaaggccctagtggtcacctggaacgggcacagcctcctgcctgctgcgatgagtccctccccattgaagggtgcagaaaggagaagaggacgcctgtttttattccataaaaatgccaggcctttgttaacaagcattaatctacatgaggagttcaaggataatcactctgcctcctgaaatgagaaattcattagttttaggaataaggtggcctttctttccaataaaaagcagagaagaaaggtttccatarcaacagtggtttgggaagaaagctttttggtactataggaaaaaaaatctcaattatctgagtacttatcttctctttctcttgactgtatttgctaccgatgactcactaggccaagcytgcgggggtgagtgagcgagagccagccgtaggagtgaggaagggaagaaagtcaatgaataaaaaccaaatgttcgttttcagcatgtagggaaaggctgcatattaagacatttaaatcatagtctgacacaggacttggaggctgtgtggcatggtgggttatttcaacataagctattatttcttatgatcttcacaagtcactttcaggtcaagaagccaaaagctcagggaggtgaagtgactgagtcagggtcaaaagggtagatagttgcagctccagaaccaagcccaggccttgcggtgcccagcagaaaatgtctgtctagcgtcagagttccctgctgggactgtgcctgccctccaagccaagacccatcgcagttgaacaagttgggttccttactcacaccgtgacctcagccaagtcatttgatgtcttggaacttcaagttccctctctgtatgtgggataagagcactcgccctgcctgagtcccaaacaagggaactaacgataccactcaccaccatacaccgtaggcgatcacctatagctctccagggactctggtgagtcctctaaatgyactgggtcgcttcacgctcacagcagctgcattggctgagtatcattggtatgcccatgtcatgagcaaggaaagcgagactgaggagttcatgctctgtgcccagctacatagctcatgagtgttagaatgctttgcaatcactaaactgtcatgtccaccgtataaatgcactcaggctgctgatattcaggaatctagcaatagtgagaagagatctgaccttgctcccaccccagtgagcaggggccagaggtggctgttccacctccctgaatctcactttcctgttctgctgagctgggtagctgtagctatgaggatcagagatgatgcctctccctctccccccagcagaggtccccgtggacaatcaggtcacygcagcgatgttgatgaggtcattggctttgctattgtgcttttgtgtgtcctcccctcagtgggagtcagtcactgtccactgcacctcctcagagagtatgcaggtcactaaagaagagacaggagcagagatatagccacaggtaggctttgtctggggtcacagacagaggagggccactagggaagatgccacagctcatactcaactggccctcttgaaatgtgagcagccctacacccctgtgaaaccttgattttgttttatgttaatgatccagagcttgtcaagcacaaaaatctcatccccgcaagtgctgctcctgggaattcccaattcccactgccagttcttctttcttaagggagtgaggagggcgaagggaaagaggaagagggagaggcagaggccagcagcagggctcaaggtcatggctgtctttggcagaaatcgctgccaatacatttaatcttgactgtgaaactctgcaggcctgtcagctccctcggatgagaatcctcrgcaatggctgaagactcgcctgttcctgttcttcctttcttgatttcagatgttcgtgggcctcctgttttggttccagtttttctgtggcttctstgcatctaccatgattgaccagtggtatctaatcttctttaatctgctcttctcgtcacttcccccgctcgtgactggggtgctggacagggatgtgccagccaatgtgctgctgaccaacccgcagctctacaagagtggccagaacatggaggtaaagctcccccgagtctccgccttccacctcctgagctctgccctccacgttcactcttccaaagtgccagtcccccagcctcccttcagatggacaccctggacaaactgaaattmtagaattcaccattctagaggatggagaaaaagggctgccctctgcttggctgcagtgcatcaagtgttgtaagcgaaactgtcccccctccaagagtctccaggagcccaagaaaagcccagagtccagtcagtcacaggggatcactgaagctagaggggggatttttctaaagcaaggaagaaaatgtgacttattttgaacgggaattaacaagaagacaaacccacaaggaagccactgagccactgaaagagcaaatagatttaaatacatactggcattaatataccacatagattcacacactgatgaccagctgtttctagccagccattaaaatagacagcaagtgcttttctttgccttgaattattccatgtgggcaaaaagaacatggagtctcatttctcctgcaataatccctaattccagattcattcactgatgagttaacttcccctggccacctctgagaatgttcagttcccacagaagcaggccgcatgcacggggtgccaggaggcgaagggccagggaggggagcagggcctctgcttgttatctgttgcttcaggggagttcccatccttggccaggcctcagcctcctcggccacctgtgggacaaagacgctgggagtgtgtcctgtcctgtggaattaagtggcccacaggaagagcctagccagcactttccctaagtgctcagccagagctccttccccagtgtgtgtttcctgcaggtcccgtgccagctgctctggtacttggcagggtcaaatacacatttggtcacccgggtaatagagacyattcatctatatcaaggttattttcatttctgcccatgggtatatagctgtttgcttttaacattgggacacatccatcgtgtaattttaaaagtgaagactcrctcttaagaaacattctaagggacccmccmccaagagaggcaaaamctggtcaaagtggaaggaatagaagggctcaaactgggggagaatgcccggaatttcaggtgctattcctacttcctacttgagagacatgttccctgggaagatgcagaaagcagtttcatcttttttttttttttttttttaagacaaggtctcgctctgtcacccaggctggagggcagtggtgtgatctcggctcactgcaagctccgcctcccgggttcacgccattctcctgcctcagcctcctgagtagctgggactacaggcgcccaccaccatgcctggctaatttttctatatgtttagtagagacggggtttcaccatgttaaccaggatggtctcgatctcctgacctcatgatcygcccacctgggcatcccaaagtgctgggattacaggcgtgagccaccgcacccagccagtttcatctttttactgtgaacctggagctactgaagctcgtctttttggtgcaggtgttcccagtgagtgacgcagctgcagatagttttgtaggtgtttggtagtgcttttcatcgggcctctggggcctcgcgtctccaaaagtcctgagagagtgagttttccttgggtgcttgccttgtgcattaacttacgtgtagcatcctaggaaatgtcattcgaggtgtcaacctaaatagcaaacagagagaggctctctaaaagagaatggtgtttattcgggaatagggcactgcaatgggaatgtgtgtgctgtagtaagctatgtgcatatttagcgaggtaaaggaagacaaatgtatttaaaggaaaaaatttcatgatcgttttgagatgctctttccttgactacaaggataaacgacaaagatggtgcctgtttgaggttggacagacagttgctgggcacatgtccttatagatatatttttctgtggatatgatcatttttgttatcaggtatttatgcatgagaaccctcccttcatggcctttcccagctctactcctcagggtgggtttttgttgtkattgttgttgtttttaacacaagtgactccatttttattctaactgctttcacagaggatgccaatgcttcactgtaacatcactgattgtttttgtgtcccaggaataccggccacgaacsttctgstttaacatggcygacgccrccttccagagcctggtttgcttttccrttccttacctggtaagttggcccctgggtgcagtttttcttaccagctggatccggggacctacagatccaggaccccactgtctttcaggcctactatgactcgaacrtggacctgtttacctgggggacccctattgtgacaatcgcgctgctcactttcctgctccacctgggcattgaaaccaaaacctgggtaagagccgcctgcatggccacktctcagaagagcactgatgccgtggaccccacacttccctgcagattcatgaggtctgggaggtcgttttgagtagacaggagactgcaaagctgacctcagtgtgatgagaaggacaatgacacattcccgagccctgtggtgtggggagccgctgcagcctgatgctcgcacttccccggccatgctcatctccctcccgcctctttcccgcttccaccaccacattctctcctttccctcctgtcttgccctctygcccctgactccatctcacctcatgtgcatctcccagggcggtccatgggttctggaggcctcattgagccccaccggttacccgcgtcatagaccgcagtgtgtctgaaggcctcagaacctcacacctgctcattgatgactggcacgtttttgttattgtcattgttgtcacttttaggtggaaataaaagccctttctttctcattccccctcagacctggctcaactggataacgtgtggcttcagtgtccttttgtttttcaccgtggctttgatttacaatgcgtcttgtgccacgtgctatcctccgtccaacccttactggactatgcaagccttactgggtgacccagtgttttacttgacttgcctgatgacgcctgtcgctgcactgctgcccaggtgggtgtcggagcgggatagtgcctctgagccccgagtgagcccagacgacattggcattgcttctgctctrtgtgggtctctggaagctcaaagacaccaccgacaggaatatctaactttttgttttaatgtactttttctagattgtttttcagatccctccaggggagsgttttccccacacaacttcagctggcacgtcagttgaccaggaagtcccccaggagatgcagtgctcccaaagagacctttgctcagggacgcctcccgaaggactcgggaaccgagcactcatcagggaggacagtcaagacctctgtgcccctgtcccagccttcttggcacacacagcagccggtctgctccctggaggccagcggggagcccagcacagtggacatgagcatgccagtgagggagcacaccctgctggaggggctgagcgcaccggcccccatgtsctctgcgccaggggaggctgtcctgaggagtccaggagggtgtcctgaggagtccaaggtgagagctgccagcaccggcagggtgacccccctgtcttccctcttcagcctgcctaccttcagcttactcaactggatttcctcctggtcgctggtcagcaggctggggagtgtcttacagttctcccggacggagcagcttgcagatggacaagcgggacgtggacttcctgtccagccccactcaggccgatcaggacttcargggccagaccacagactacttataggagcatcttcaaggcggtcacagtgaaaaccttgaaatggccttttttaatatatataaataaatgttaatattatttatgtttattatttgcacagaagagttmtagggagatgtatttctaaatgtttcccaggctaatacaggaaacaagaggtaccaaaaaagaaagtttattttttaaaattctaagtagagtatattgaaaagaaaaagaagagccttaacatatataaaagtttaaagaagagtaacacttgaaaagtgtgtttagatttattttttcatctcatttttaagaacaagcagtacgatttgttttcttcaacatgtgtgactgcgcactgagtacaaatgtgtgactgctcatggttaatgcaggcaggtgtgaacatgggggaacaatgagcagagatggcagagggcagagcacatggcccccagaggcttccagtctcactgacacaggagggctgggctccacttcatccagatgaaggaaaggaagacctcaagaaaaattcacagttgagtgcatcccagcattctgttccgggcaggcatttcaggaagaccgccttgtaggtattacatccctggtgtcgtattttgcctgttaaatcgtaacaagcaataaacaactttcactttgcaaagacagtgtgtccagttaccactggtgtatgaaatgattaatacctgacctcacagagtatgatctsagggcacttccgtaaggcaagtccttttagaggctatgaagaaaacagctgcatggcacataccaaagctgctgcacagcyggccaccatggcaccctgcaccaggccatcagcaccacgtgccaaggagctcagcggtcttcaggcatttttgtaatgagccattagttctgtccctctaaaactagaaaaggaagggcaggaaatgataacaacccaaggcaatgatatggcatgtcatcttcygagcccttctttctactttgtcaaacagttcttagttgctggctctgctcggcaccgggrctgtgaagggtgtactccctgctgtgtgggagggacctagggcctctttggatgctgtcttcgaggacagcaatgcagagagggcataggatctgaggacaaggaaattcctcagcatggcgtatcaggaaagcatggctcattctgcaatgagccatgagtgtgggccatcgcaagtcacagaaaatgcacctcattccagtcaagcagaaaaacaggcacaggctcagtgtaggtcccaagagagggtgcctggactcagcaactcrgacctgggcttttctcccagctttcagggacagctttgtcctgagtctgcctctgttcacggggatgcttggctggagtcacccccaggacttatccatgcatcactattcagaagacacagagggcccctctctccacattccaaacagagtcctggtttcctcagcctcaccctgcatagcttgcacaacatcctcagaaccattcactggcaaatggaggggaacgtgctgactgggactcccagctggagctgggaggagaggtccacttcccttagaacacctgagctgctgcatgagtggacgtcagaagaatctctatgccctgttaaatggggagacaaaggggtggtgggggcttcagccagtgatttcggaccgaaggtgacagccgtcccaaccctgcccagcctgatgccacctcctctgttcttggaacaacgcataggaaaagaatctcctttggaaggtgacactgctccctgaattaaggtaatkgttgcgagcaccaagtacaaggactagacgcatatttacctgcgtatctgagagttccagattyccagcttccagatgatccttgcacagacaacctaccttctttccagaggatgtctttctcctctggagagtagatgcttgctcttgggaaacggaatgaccttggcgctggcttcaggaatatgcatcccacagccagtttagagaaatacatgttgtaaatggcattgacagctgctctttaggatggggagtattatggaaatccacaataacaatctatggcaagcaactaagtttggtgtcaaaatgaacataatatgggggcgaacttcatgattatctcaaaaaagcagtaggtgaaataggttaccaaatcctaataacaaatctaaaataagtaggaaggctggcttcctgaggcttggtaacaaaatagctgggttagtcatttgacattgtacagtgtgcccagctcaaagtcaaaatcaattaattctaagttctcggaggtcagatactatgtcctcttcactttggatccctggcaccttgcacagaacctagcagtttgaatgtgctgagaaaatgtttgaagaatcaaagaatgagtggtaatcctgaaacactgaaggcattcctgtgataatcagaggtaaaggacaattgcttgcagtaacccattatgatttaatattttctgtaatctctggctaatatgacaagacatgcattcttcaaaagaaggcatgtgaagtataaagatagtgggttgaaagtaaaaggatgcaaaaggatttaatatataaacamtatgtaaaagaaaggagacataattatattaatatcagacaacatagacttcaggccataaagagggacctgaaaatgataaaaaggccttctcaggacatgagaatcgcccaagtgatgtactcctaataaccagagctttaaaatacgtgaaactcaaatttacaaaaaggagaaatagacaaatcacaaatatacccagactgtctttcagtcatttatagaatagatagagaaaaagtgggtgtaggagttagagagacataggcaatgtccttatttgtgactagaaaatgcaggccccagctgtaagtgtgcatggctgcaagtgcttggatgtaactacaagcagagcttctcccctgcacatggaagtggcccaagccaagcaaggccagggaggcgcggggagaggtgcaaagtgcagagaggagcagggagagagacctgggagaggagtgagcacagagagggtcccggctccctgactcattggccaggaggcacctgccctcatcgtatctgtgccttcggtaaggggccgggactcagctttgccctcctcctgctttcctcgcatctctactgaaaatgcacctgtttggacctgttacctcgaaggcatgaagactttcataagtgttcaccctgccactgctgcagagcccatgtccaggggagcttcccacactcagggtgagggcacatttgtggatcacaaaatcaactttgtcaccaccagctttttggtcccttcctttcccctcctcctctccctcccctttcccctccccttcccctttcctttccaacggggtctcattctgttgcccaggctggagtgcaggggtgtgatcacagctcactgcagcctctacctcccgggcccacagggtcctcctgccttagcctcccaagtagctgggactataggcacctgccaccatgcccggctaatttttgtattttttgtatagatgggctttcgccgtgttggccaggctggtctcaaactccgaggctcaagcaatctgcctgccttagcgtcccaaagtgctggggttacaggtgtaagccagcgccgcctgaccttgtttttctttaatgaaatgatggcctttggtggtctgagcaagctctggggaagacagcctggttgctccctccctcccagcccctggggttcatctcactcagaagggaagccatctccagggcctctcagtggtgtggctgctgttacacgggccctgagatccccacccagaggatcttcctgttgcaactccttttttatctcaacctagcctgttctcacacaacgtcaacctggtgtcttactgaatgaatcccttctcatgtttgtatttaaaagcactaaaatactttcgaactacttgaccttagtttatacctaacctggggcaagtgttttggaacaacagaagtgacaagagtgcttacaggacgcttagaatggtactgctgttctctggtcctcattaatcaaaccacagctggaggccttcgctggaaagtgtacgacatggctcagacttgggatggcacaaaccaacaccttctgagccaggcccaggctcaggcccaaccagtacacgatgtgcctccaactttgccgggagaccatccgcggcttccaaaattccccgagcagcgtgcgcacacccacagccatccagccagggcagacttcggccggctcttaaggttttcttcctaatgaggaattttcagcatcctcagttcttgtttaaaatggcacacaaagcccaggttgttccctgaactgcaaacctgtctgcttttcaccttttcccagcctctctggctggagggcgacagcaacccaggtgagactggggaggccccaggccccgggctgtcctcccatttcccttccagctttcagcacagctgccttctctaatgccacaggcagattcgtgctttactgcagaaagtggtatttcctagctcataatttaattattttagaaaaggctatctttttagttttacagatgttaactttgcatctcaaagttaaatgacaaaaaaataataaataatgtaagacagaccagctgtccagcaaataatccagagagaaatgcaaaaatgttctggacagccagggctgacccatctatgccttcagaatgaagctgtgaagtttctttttatttatttattattcccgaagccgtgaattttaaagaggcctggccagggacacaatcactaaataaaacaaagaaggggatcctgactagctgggccgtctgagttaaccagtcatttattatcaacagcagtccctacgctgggaagacagcagaggtgtgtagacaggtagtgccaagcgtctttctcatcctgaatctcctttgtccaagctcaaggcctgtgatgaagactcactctcaggcctttggggtacaagaggctgccatggttattctgtttggaaaacacttccagagccctgaccccacggtgcatgggtggctctgcctcatcacccagcaagcctgaggggacctgggtgagcttcttctttgccctccaaccctgcaggggcgtcagggcaccatgcaactcatgcccacatgcactttgatggagagcgtcccaggctggggacacacaccaaggcttgccatcacgttcttttcatcagtgtaacagcggtaactgtccagggacacgcaacctccttgtctcccatcacactccgtggcccaaacacagcacagctggagccgggaaatatccactaggtgaatgcccatcactgctacacactcacagctgtctccctcggcacctgcacacgcaggacagctctggacaggtggggcactgaggcagcccagccaggctgccaagacagggctaagaagcccagtggaaattgtggatttcaccaaagactcccagagagaagcattgccatcccctcccttctttaaatgcaaagaaaaaaaaatagtttgttgttctcaggacttctgggcatggcagtctcaaaaatgagccaaagcagacaagaaagggcatgcaaggccttctcwgggtgacagtgacgaagggtgagtccttcagaacgctctactctggaagcccrgcccactgcagagtgacatctccgtcacttggaagggcaacgtcgtcccccagctgtcgggtccagttcatgcttgtgaaagtcctatgtgtgtggccacacatgtgaggacacattagagtagtttgaaactgaagagagcaaattgcagaatgaggacagttctgacagaaatgtacctcttttgcagctgatgtagctgaaagccattggctgctgcacgggagcagcagttgtataagaccgacacccaggaagccccacctctcctcgacgcttgtttgaaatttctgccaaggagtgtccatgacagtgggtagcaggggcctcctccgcccctgcccagcgcatagggggagtccagcaggttttgcctgagctacctcgctcaaccggagtgggctgctcctgtaaaacccaccctccacgttggaatgagattccagttcatcctgacggctgaccactggagtggcagcccaccctgcagccctcagagcccctgaggggccctgggtatggttttgcatgctgctcactggccctgctcattggcccttgcccctgtgaccctccttctcctcgtcccaccccaggatgttacgcttgggatgtggccgtgcacacatccgtacaagtgtctcaggagcagtgactacaggttagtccttaaactagtaaccctccgcacacctcgtcttgccctaggaccccttctccctcccaggcaccatgatttcccttaccctcggtctaccctcgaaaacaaccaccaaacatatcttacaagagttttttccattgttttggtaatcattcatataaaatctcataacaaggatagtcaaggcatactcaacatcactaatcaatagagaaagacaaaaccacagtgagatagcacctcacccccattaagaaggctttctggatcatttaaacaatgaagaaatgacaagagctggtgaagatgtggaagctccagagccctgtgcactgctggaaggaatgcaaaatggcacagctgctgtgggaaacaatgtggcaattcctcccaaaattaaaggcagaatgaccatctgatccagcagttacagttccaggtacctacccaagcaattcaaagcagggactcacacagatatttacactgccatattcatagcagcattctgcacaatagccaacagataaacatagcccatgtcggccgacagatgaatgaataaacaaaaatatggactctacatagaatgggatattattccgtcttaaaaggagggaatgtctaacacatgtacaacacagatgaacctagaggacaggaaactgagtgaaggagggcagtcacgaaaggacgggccgggcacggtggctcacgcctgtaatcccagcactttgggaggctgaggctggtggatcacctgaggtcaggagttcgagaccagcctggccaacatgacgaaaccccgtctctactaaaaatacaaaaattagctggcgtggtggtggacgcctataatcccagctacttgggaggctgaggcaggagaatcacttgaactcaggaggtggaggctgcagtgagccgagatcgtgccgttgcactccagcctgggcaacaagagtgaaatcccttctcaaacaaacgaaaaaaataggacagatgatgtgactccacctacatgtggtgcctagagtagtcaaacttgtgcagacaggaagtagaatgggggtggccaggagctggaaggggaaaggggagttcgtatttaatgggcacagagtttccatttaggttgatgaaaaagctctgcgatggatggtggtgctggttgcacaacagcatgaaggtacttcaggccccggaaccaactatatgctttaaagcggttaaaatgatacatttgatgtatgtgcaagttaccacaacaattttttaattaaaaaaaaaagaggcaagagcaccttagggaatacaattttagatcaaaatattttcaaagcactcgattccgagacagagctcagagaggcttccagagcctccagcctgagcctgcttggtggcagggcttgcctcatcacccttcactttcagagcctctgaaagttcatctccttgtaaaatcaacatgacagcaaatgtgtctgctctgactgggaaaccctgagtaacttgttggaacccaggtggccataaatctctgtcctgagttatggccggagatgcaggaaacacgtggatgtggaggtccagtgaaagtcattctgctatttttagctcccactttctctcagagaaaactgggggctgacagccaggggctcg

SEQ ID NO: 94297 - DNA, 18771 bp, Homo sapiens
caagtagccctgccactctatgtacagtaataacaatatctgtcccagttattatgtacaatattataaaaaatgtcgcagacagtacaaattaaggcccttatttctcaaaggacatcaagtcttatgccccgtgggagggaagatgccacttaattattgcaccattttgaaaaacagaactcatcaaggcggatagtggtcttttcccacctggtcttcagtcacagatgggggctggggtggtggcgccgtcttcgtcgtcgaggtagaccctatggagccacaccgccctgccgagttctctgggtgcaataaataccagtcacagtttgggagggggccgcgtgcaggtggggaggcctctgggctgcatgtgccgcttcctgtgcagggcaaggtgggcagagcgcaagaaggcgtggtggcaccaatggccctgaaatggccrgtggcccctgtgcttgtggtggtggagcgttagcttgtctgagtgagcacacttccagctgcttccatcccagtggcagtggtcgggcttgtcacttgtgtgctgcgcagatgtgcctgcaggggagaattcttgctgtaggtctggccgtagccacataggtatgcctggtgttgcagttcccaggccaggagcagctgccaygcttgggcktggcctccagcagctccagcggggacgccggtgccaccacaaggacgccgcgggcgactgggggtgccaggcccagggctgtggcggcggcggccaccgcctaagaaactaaagacaggggcgtggaggggcggagctgggyggggggcgcctcatgaaggccgggctgggtgtcccaaaccagggccacggaagggcagcgggaaggaggcgtgcgggccgtaggggctgaggggcaggtgttgggggcggaatgggagggacccgggacctcgcatgcatgaagctgcaggcccggggcgccctagtgtttgagaggacgcgcaatgcatacctgaacctgggtgcgcagccgcagctgccgccatctgcttcagggtgctgggctttgaccaggtggctgggcagcgccagttgaaagcggttgagcaggcagggcgcagtggctcacgcctgtaatcccagcactttgggagaccaaggcgggccgatcacggggtcaggagatggagaccatcctggctaacacggtgaaaccgcgtctctactaaacatacaaaaaaaaaaaaaagtagccgggcgtggtggcggacgcctgtagtcccagcactttggaaggctgaggcgggcggatcacgaggtcaggagatggagaacatcctggctaacaggtgaaaccccatctctactaaaagtacaaaaaccaattagccgggtgcggtggcgggcgcctgtagtcccagctactccggaggctgaggcaggagaatggcgtgaacccaggagatggagcttgcagtgagccgagatcgcgccactgcactctagcctgggcaacccaaggagactccatctcaaaagaacaacaacaacaaaaaccagctgagcagcgccggccatgtggcagtgggtccagctccagggcgccctagggcagcggtgtgcagtgttcgggtaataggacgcagacggcggggtcgccgggggcttcggggtggcctcggccccaggccatccagccctgtggaccgaatggagtcccgcacgctgttgaggtagtcgtgggttcccctggcctcgggctgggcgcggggtcagcgcacctgcaggcggcgcttgcggtacgggctggtgaaagtggagatggacggcaggatggattcacttggccacatggcgcgaagctgggaagacggacaccggtgagtggctgcccgggagggctggtcggggcgcggacaggcgggcatggttctgccaaggattttgctttatttatcgcaagatggggtatttcctcctttcttcagtttataattgcatgaattagtgcagtgaattgaggatgcagtaaaaatatcttcaaagattattaaattcgttattataaaacacatagaagagtttatgtgtgtatatggaaagcaggtatacatcaataattcttaatgaatacaagaaagaactaccaatattggggcaaatttttcaaatacaaacatcagtgaatataggcaaggccttttcttttttattattctattttaagttctagggtacatgtgcacaacgtgcaggtttgttacataggtagacatgtgccggcaacgccttttcaataatgtcttacaaggagaaacgtggctcctctaggtgagcagccctcagtgcgcatctccctgaagtccacattgatccggcagagctgtggggttcacagctcacactgaggcattcagggcctaaaccccactttactcttttgtacaatgaatgggaaatcagtgatctaaatgagtttaaatcttattagggattcagmctgcccttcagactctgtctctattcctaccagagctgggttcaacatgaattcaaatasaaatatgagacaatgaattatggtagtgacaaagaccttccttcgaattyyggatttttctagcagcccctttctttctgcttcccacctgccttcaactctttctcctaaaaaagttcagttggggtgaagtttggtgacttagaacatcattattttaacgtgatcccaaagcrgttttcattatatgcaaagctgtatatttatttacattttwaaaaatgttctaaattggtttcttatgtccaaaagaaggggagctagttataagaaaagagaattgagtaacataagaaagtgctaatcatttcaaattaaagtgggaaacatgcaaagcagaaagaatsaatttcataaactcaacaaattattaacataaayaaktccaaactcttgtatctatataacatcagtgatctgtgaggtgaaatgagattctgaagaaaaastaaataataaggccatttttctaagccaaaaaagtttttgtcattaattgtggaatttcacaaattaatttttgttcaaataaaactttcttaaacttttagtgcttactattgcttgtaggttagtaaaccctagcagaaaacaaaatcattaaggaaatggaaaacaaacattaatggggaatttgtgtaaccttaattcttaacgtgtcttatgagttaattttttaaatgtgaaggtttattcttggtgtttggtaattaactaagtttattaatctctcaaaaatatgaggaattttattccctaaaggaacatgaggaacacgagtagttcaagaaaatgctgaagatgcgcttggctgggaagctagggtaggctgacgaagtcagacttagtgtgggaacctgttaagcagtggatcgatgttagctgttttcacttattgcactagtataatcagtttgatgatacatactttagccccagctgttacttaagacctggtttcacattttatgttctttttcctgtgcaggctgggaaagggtttcttctgtccataaaagctactccaatggctgtgggagacttaattccaattccaggtgatacagccgtcaatctcccactagctgtaggatggtgtgtgtgctgcagttcacaggtgtggatgctcaagtgggctttcaaagatgtcatgagagggagggttattgtattaggcacattttccaaatataggcatttcattgtacaagaccccaaatgtgagagggtgtttgtttcagtattttatagagttcctaatatgccatcatatatacattcagttgttttcaaaatacagtttagtacttggctactcacaaagtaataaaacatttaaatcacttaaccatacaattcttgataaccaaaaggcttttctttctactcagtagtttaacattcagctttcttttttagggcaaaggagatagaagtggatgaaatgagagaattttctttaattgaactctggttaatgccaaaagtgttcaatcactatgtgtggggaagtttcctggtacaaaggaaaaaaaaacaggttgttcatacatttggctgtgttagtatgtggtaaacagaattaaatttttttatgtgaactcgtacatmtgtgcttcataatatgtcactcctatttaacatctctttcacacacacacatccccccacctccgcacacacccttttgctagtcttcttccattttgcttattaacccaaagaaagaaaaaaatacagaagccttcttgcataggttgctttaatcagatgaattattgaagccactctgtctaaatattattttcccttatttttctttcattagtttttcattcagttgtatttatttaatttttatttcattttccagacctaagtcagtgttagtctaccactgtacatctggtaacctcaatccctgcaaccggggcaaaatgggtaagtactttagccatgtaactgcataattactagtgtctgacacagagaagaaatagacagtgtgtcatggagattagagcctacatggggaggaggacaaaaagtaagcaaagagacaaaataatgagaaattgtaaatgtgtggtagttaactagaatgtactgtggttaccaaggaaaggagtcattgggaacacatacatgattgtaagcagtagggggtccattggctatagagattttaaaaaacaatgatgaaataaagcaaaagttggcagttataaagaatctcagtgataaaatactgaaatactcctccctgctggggcagtgggtcctatacacaccccttcccttsttgatatgtcactgagaatgcgacgtgatcaatgaccaatgagatttagraaagtcgggtgatattattccttccttattgagtgtgtaatagtgatcactaatttatgcaacttgtttctcttgggtgtgcattaactactctactagtgatttgtaaaagtgaataggaatcactatgggagaataaaaacaacagccagattccttggaccctgtgaccaaggtcttgggtgatgctgagaaaactatatttttaataagcatctagatgtttcttgatgcttgtggaaatggtctttgagaaaccctgtactatacaaatgattaatttgtctgaatgtaagggatttaatctgatcaatgtacaaaaaccatggaaatcaatttgagtacaacttaaacatctaatgatggtagaagataaaagtagggagttttgctattctgtagaatttcttagtacctactaactaacgcaccccttctatccctgttacataggtaccactagctcttcatattccaatggtaagccatggtaccacactgaragttctattgcagggcagctggacactgtggctcatttatatattgtgggtttgaattgaaaaatgcttttccacaatgaaaaatacctggcctgcatgtttcctctacctctctcacacctatagcaaacactgcgggctgatacgacattggttatccctgtgccaaggctctgttctagattcccttctaacacagcatttctggaagctattactattaatttgatgttgcattcaaattaaactcatttgtgtttcctattggggactcttcagagggataaaaatgcttcctactaggagcagtagccatgttaacaggaggttgagcatatatagtctcaggtgatattacaaggagtgatagacagctgggtgggtgaacataggctatctctccattgaattgtctcctttagtgtcccttaagaagagtttttaatctcctgcatatagatcttaagcatcttttatcagatttatacctagggcctaggtaattgatgctttttttttttaactaatttaaatgtcttttgtaaaaatacattttctaattgtttgtggatgatgtcaaatgcaattgatttttgtatattgaccttatattcagctatcttgctaaacttattattgctagcaattgtataaaagttcctcataatttcctaacataatcataatctgcaaaaatagcagtattatccccattttttcaagctttaggtctttatttttcttgttgatagcaccatctcagctcactgcaagctctgtctcctgggttcacgccattctcctgcctcagcctcccgagtagctgggactacaggcacccaccaccacgcctggctaaattttgtatttttagtagagacagggtttcaccgtgttagccaggatggtctcgatctcctgatctcatgatccgcttgccttcgcctctcaaagtgctgggattacaggagtgagccactgcgcccagccttcttgttgaacttctactataatggtgaataaaaatggcaatagtaggtattattgtcttgctgctcattttaagcggaagacttcaaatattaaactcacctgccatttttaggataaacccaacttggtcataccatgttatctttttttatattttgtttaattcagtttgctaatcatatagttcccttgtttttctattatctgaaagtgcttttgtaatagtggagtaatctattcctcgaaaacttgggaaaagcacctttaaattatcttgatttataattttttgtgagaagattttttattgcttcagtgtctttaatagttaaagaattttgcaggcttcattttctgttggaatcagttttagtaaattatatttgtctctttttctaagattttgtctgttttaaaatgtgtttacattcatttttttatattaatatttttgtcttaaactgtatctgtaattatgcttcttttttaattcataatatttttgtgtcttctcttttcttctcagctagtctccaaagggtttattttatttctttttttgaaagaaccaacttcttcgggctttattgacttttttctttgttctttttttttttttttttttttttgagatggagtctcgctcttgttgcctaggctggagtacaatggcattttcttggctcaccacaacctctgcctcccgggttgaagcagttctcctgcctcagcctcctgagtagagtagctgggattacagacatgcgccaccacacctggctaattttgtatttttagtagagatggggtttctccacgttggtcaggctggtcttgaactcccgacctcaggtgatccacccaccttggcctccaaaagtgctgggattataggcatgagccaccgcgcccagcctattgactctttattatgctgctttcttttctattgcatagatgtattgccttatctcttttttccccttcctyytgcttyctttgattatrtttttcttctctttaacttagaaatatagcccatgaatatttggcttgtctaatacatcatttatggcttcatatttccctcaagtgccactttggctgtatcccacacattttgttgtataatgtttatgttatcattactctctaatccttcaacrtttttcatttgaatttcttctttgacctatgaggatgtagagtgcagtttccaattgccaaattacattttctacatgtgcatgagtttctccttgtccctcacatcagacagacattagcttaatggttaaaagtcttgggctttgagatctaatagacttggattcaaatcatagctcattcactcactcctgtatttattaaatagacattattcttggtgctgaggayatatcactaaacagaaatccatgctcacatagatgttatatgctgatatgcgtccyrccatttagtagactccactcttattgtatcagttggaaaaagtctctcagtttctccctgtaratgaatttttttatctgtcagtgagaataataattattctattctagggagcycttgggagaacgtagtgagataaagtgcttagtacagtggttagaacagtgaacattttagtaaatgcttgctattaccatatggacagctttctcagaaagcctttccaaacctagccccacccctccccttcctggcacccagacagarctagatgcttcttttstattcctccagagcatattgtactggcctctagcagaatactcaggcaaaatattgtaatcatgaattgtccacatgtcccaccagactgccagttctttaaagacaaagaatatatcgtatgtaatttttttttacctcagcatctaccacagtgcctggcaagtgttaaatgctaaataaatatatttgaaatgactaaaggaaggattgatacagatttaggaaaaggaaagtaagtgtatgttgctgagayatttattgattcgttcagtcaaaaaatgtttattaggcactgattacctgtcagccacttttcaaggtactgtataggttcaaacaaaacaggcaaaattttgttatgatacttaaatcttagaaaggagaaatatacatcagatatggttgagtgattgcagaaaaataaaacagattaaagaagtaaacagtattgtgggaaggctgctatttaatatgtgatggccaaagaaastctctctgataaggtgtcatcttagtagagacctgaaagaagtgagagggcaaatcagagggacacayggatgaaatattccaagttgaagaaatagcaagtgctgaagttctttaatcatattcaaggacagcaaggaggccartatggctgcagcagaagcaccgagagggagagcggtaaggggtgaagtcagagtggtgggyagagagagtgaggatgcagagagtgcaagcccttgcagaccatggctttgcctctaaatgagaagagattccrctgaagggctctgaawgggracgttcctgtaatacactctgagttacattttayaagaatccctctggctgctacatggaggtccgactagggttacaggggtagtggcagagaccacttaggacagtattgcaacattccaggctacagtagtggtttggatcagagagatagcaggtggwaattatgattctgggtatttttcaaacagrgctgatagattttgttcaattgtgtgtgggttgttaaagaaagagaagamtcaaggataaccccaaagtttttggctgaactactaaacaaattgaattagcatttggttagaggtagaagactggtgaaatagcaagtttgtgtatgtattgggaggggggtggttagcagtgggtgtatcaggaggcccattttagagctgttaaatgtgaatgtctcttacacctccaggtggaaatgttgaataaktatatggatatatagatcagaacatcagtgttgagatcagaatctcttatgctatcaacctgtacataactttcttatttaccaccatctttttaaagtataaatccctatggaccagatgattcttgagaatcttctctgaagaggagttatatttttcagatagatttttagattttaaaaaaatgccagtttttttaagtagggcaataatcgtattactataataactgacatcataattgaataatgagcttaggcatatgctttgcaaaaacctacataccttaaataaaattgaattcaaatgagtatcttttcgaaagaactgctgaattcacaaatgtatgtaaacagttcttagttcagcttaatctaagtattaatataaaaacactactatggataaaaccctggataccagagtggacagttgagtcttacatattcccrgagaaatatttaaagtaagstaacmcaagaaaatcttgcctttagaattyttaagttamacttttaataaagattcaaataaaatattaagaaactttctaaatggttctgacagtaatggtccagcyagggaaataaagtttctagcctctttcttggggctttcagaatagactagrtaaccttagaattaaatgtggatttatgtttttctgaacaktacccccttttattgactacatgtttccccaagaatttgttktagagtagrtgtttcaaataaagggtccaattcttaayccattcacattgtctcattttgcagataaccacttgcctagcataaaaatctttacgttgttctcagaaattgattcttgactctacacagcaaatccttcrtctttattgctgtgacccattataaataccttccactatrwtgggcttatattytcctattctcctctagcacttactctcttttttyccccaggtttccaggtcttggcaacctttgaaattccaaytccatttgagagagctttgasgaggccatatgctgatttyaccacmagcaacttcasaacccagtactggaatgccatcagccagcaggcccctgccatcatctatgacttctatctgtggctcactggaaggaaasccaggtgagaagctgagtcaatggctttgagaatgtcactgcatatgggagattgaggccccaaagtctttagggcttccttcagccaaagattaaaggagacaactgaatctgacccatatatacagattgaacacacctactctgaaaatccaaaatctgaaattctccaaaatccaaaagtyttgagtgctgacatgatgccacaagtggaaaattccgcacatcttacctcatgtgatgggtcacagtcaaaacacattcaaaactttgtttcatgcataaaattatttaaaatattgtataagattaccttcaggttatgtgtatgtggctaagtgtgtatgaarcataagtgaattttgtgtttagacatggctcccattcccaagatacctcattrcatwgaagcaaatattccaaaatctgaaaacagttgaaacccaacacacttctgacccaagcatttcagataaaggatactcaacctgtataagttttgaacaaacaaagcagtcatagtgagaagccacagaagcctcctacattaaaaatgctccagcataatamaggaaggtaaatgttaaagcgcctgcttggtgaattcagcaagtgatcattcacrcaaaaagaaaagcaactgagactctktcrctagggtttttcaaataggtaaagaatcttaaatatccagtaatgatgacarcctcacttactgggagcttactcgtggggctaaggaggatgcatgatgatcccgtttttattgtcgcagctaccgaaggaagataccctcatcaacccaattttacaaatggagaaatagaagttaagggaagaatctgaagtagtctcaaaggcagtgacaggaaggatgtggagaaagctgagtgtcaaagtcagtattcargaccrgmtttactgctacttagagatgaatgaagaaatcagagggaacgcagtgtgctgatgctaaagcagctgtcaccactcagctgtgtgacataggacatcttcctctgtctcacttgaataatatgatgtgtcagaggagayatgattgtaattgcctaaagcaatttttgtgatcaagaatcagaaacatgaacagtattgctgtctgtgttagcccctttataagggaggaagtcatcttcagcatgttgaattgtcatctttcttagcagtgcaaatgactaaaacttagccaatgtagagtttatccaaatttggagcaaagtgaaaagaaaccattgtgattatggggaaaatatttgtatgggactattaaataaagacacgaaaagaagaaaacccaaatattataggcagaaatgctaaaggttataaaatatatcaggattggaagaagccatggataaagaacaaagttcagttaggaaagagaaacacagaaggaagagacacaataaaagycatgtattctgtgagaagtcagacagatttgtggggaatggattggtttgttgtatggtatgtattttagcaataatctttatggcagagaaagctaaaatcccttagcttgcatgaatgatcacttgctaaattcytcraggtaggcrtgatgaaggagggtttagaggagacacagacacaatgaactgacctagatagaaagccttagtatactcagctaggaatagtgattctgaggrcacactgtgacatgattatgycattacatgtatggtagtgatggggatgatagaaggaagaacttatggcatattttcacycccmmaaaartcagtkaaatattgggacactaaccatccaggtcwagaaaagtcacatgccatagccatggtattgcacatcattcatcttgcattctttgagaayaagaagatcagtaaatagttcagaagtgggaagctttgtccaggcctstgtgtgaacccaatrttttgtttagaaatagaacaagtaagttcattgctatagcataacacaamatttgcwtaagtggtggtcagcaaatccttgaaygctgcttaatgtgacgaggttggtaaaatcctttgtgcaacactctwactccctgaatgttttgctgtgctggrrcytgtgcrtgccagrcaaggcsaagmtggstsaaagagcaaycagccacctctgcaryctgccacctcctgctggcargatttgtttttgcatcctgtgaagagccaaggaggcaccagggcataagtcyactcacttatatctgtctgraacataacgcttgtttgtttttacaacaaataaaattgatcttgaataaaaactgagtggtcattgtcattaatctttgaagccagattaaccttttggtcatgcctagtctaagagaaaagagatactcttatcaataaatacagagcccagctatgtcagtgaagatctcaagtgcatagaaagtagtatagggaagagtcagaggccaaaaagacagtgatggcagacattgaacagaggagagtgtggtgtttgcctttccatcaactgagattatggaagaacacctgaggcttgcggagagcacctacaagataccataagaacacctatgaagtgagaaaaattgaattactgttgttcttgtggttacgattgtatttatggttgttacttcattcgtattaatcacctatgtgcccaagtgtaatcatgaagttaggtttttcccagatttttttattagactcaagaattcccatagacaaaggcaatatcactatcctttttatacatttcttctctcagttctgcagagccagaatgtagagtccaatcttttagataggtcatgcaataaaggctgacttggattatctaactggtacatgaggccccgtgtggtagtttactccagaggaaattggcacctgtatataattgtagttaagttgatcccttgatatcagaaaagtttctgctatgcagtcctttttgatgatttaataatatacgtcctcattttagacagtaccagtggccatagatgcacttggcagcagagtattacagatggtaaagcttgaatctgcgttttagtagcaagagcatttggagtcttgtgcttcccttgtagacatcttcttcacatctacagcctatctttcgtctactgttgttactgctactagttccatagacattctaattttcacttgggatataatttttgttatttgtaagctccccctttttcattttttcaccccctttcagactgttctaaaatcagaaaggaaattctcctccttgagcatgtatatgtttttggctcttggaacttgagatgatggtgcaagtaagtaccagcacattttccagataagtcatgtgaagtgatwtatgtttcataatatgatcatttctgattgatcttatctattatgacyacccatagagatggctgtaaagaattaagaacatcaaacaatgtcaagttgttcattgcatgtatttcagaacattgccaagataaagccaggtggagtcattaatttcaccagcaagttatttccttgctgcaataccaaagattgtaatttttgaattaaagcctctggtttttctaactcatctttcattgttgatcatggcaagtgaataattaatgaatgtatatgtttaggttatgaggaatttaaaacacaacctaagacttgtaatgttgattgcttttgaatgttgtaatggttttgagagtgtctgcttaattacatacttgcttttcttagaaaatcaactcatttcattattagtgattaattttctcttaaatatttaacttcatattttaatcactgtgcctgggattccattagatatttgaaaagatcaagtttaatgtttttacccaggtaacatatacaatggctcaagatttgtgttcaaactttgatctcacaatttaaaaaaacacgcattaagcaccatggaaatcccaacaacttcagcaagaaagagtctttgttccatagtttctttgcttgataaatatgtgcactaaaataaatggaatatcttaattcagtttttgcttcatgagactggttgagtgaacttaggcctagtgctttgaaaattggcctgttgtagaagactgatattctaattgcctaaagagagtccatttcttataagaacacatatattttggaagatgtggtatttctcagaaaactgctgaaatgaattatgtatcttttctatctttaattttattactttcaaagatctaaagctttcacttgaaaattagtcttttggaaaaaaagacattgaaactagtgttaaattatatttcattgaggtaatgaatataaagattcatttgctgtaatctccttgtgatcttttaaagtagtttcttgtacttttaaaaataacactataatggtctatatgtgtatcagtttttacaataatttgtttaaactttagcttataccagtgtgcatgaagaaccaagtgcagtctgaattagcacaatgcaaatagaaaaccgaccttttattttcctcacaaaattatatctaatataaaccttatgtaaataaagaatttttargtgcttgtaaattagtaagaaaatcatacaaaatgtcagtggagtagaatagttaaggattttatatcacagtaaaatgcatttctaaattgacagtattgttataaaacatattcttgaatattgtatgaatttatcaccactattgaagtcaaaataaagatggatctctaaagtatacaatttatttgggaatcacagaattgtagttctgaacaaaactgaaaaccatagtggtcttctatatgtgtgaaggacaaagagaagattgggggtttactagcaagggaaatgctacatattgttttgaaagaaagctcacggacactagagaagattttgggagctggtcaaacaagcctaatgggagacaaatcttttgagacttcccaggagcccaactagaaaatcccttagtcaattttaggtgaaaaagacttaaacttgaatttgattctggggaagtttgtcatttgtttggatgcaaaaagcctaaaaatatttaattaaagtggaattacatattcttgagagataatggtcacttatttaaccagagtaataatggaaagacttcaaaaacaaattcaaaagttacatagtcaagacaaaaaaaaatacttagacctgtattagagatgacttagttttttcagctgctcaaaacccgaatgaagacagcccaaaccacaagaagctatcttaaaacataaaatatctgcttgttaggtagaatacttagagagagagagaaaaaaccttttgtaatatgaccattgctcttggtatatgcccttttgcataaactggaaattaaaccccatgaaaaactactttaattcaattagacgctggaagagtgtgtgtctaaggttataagtaaaccatattatagaataataatacacacacacacacacacacacacacacacagtagtacctccaccagggggaatggatggcttttagaaaaagtaagagcatgtgaagtttcctggttacatagaacaatttggatacatcagaaaaagccaagagtacagaattaatctatactggaaaaacgtttttccagttttttttgagactaacattctcagtgtcaggttataatacctgagtgcgaaatgcggaaaaatgcaataggaactgaccaaaaaaaaaaaaaaaaaaagagagtcaccactttagttaagcaaaaagatgtactgttttaaggagagaagaagagcataaggcattgatgtattaactgcaaattacacgtagtgagatgcataaaaagccaaagccttgagataaaaatctgaaaaactttaagaggaaaactctacctcctgaaacgaagcggtcatttatttttctttattgctgcttctaaaaagaggatacatgtacagaatgtgcaggtttgttgtataggtatacgtgtgccatggtggtttgctgcacctattgacccgtcctctaagttccctcccctcaccccatcccccaacagaccatggtttatgttgttcccctcgctgtgtccatgtgttctcaatgttcaaccccccctgaatgagaacatgcagtgtctggttttctgttcttgtgttagtttgctgaggatgatggcttccagtttcatccatgtccctgcaaaggacatgctctcatgtcctgcgtagtattccatagtgtatatgtaacatattttctttatccagtctatcattgatgggcatttgggttggttccagtctttgctattgtactgcaataagtagaatgatttatattcctttgggtatatacccagtaatgggattgcagggtcaaattgtatttctggttttagatacttggggaatcaccatgctgtcttccacaatgattaaactaatgtatatcctcaccaacagtgtaaaagcattcctatttctccacagcctcgccagcatctgttgtatcctgactcttctaaataatcaccattctgactggcatgagatggtctctcattgtggttttgatttgcatttctctgatgatcagtgatgttgagctttctttcatatgtttgttggccaacttcttctgagaagtgtctgttcatatcctttgcccactttttaatgatattattgctcatattaactttgaaatgactgaaaattcaaaataaagacaaagataaaattatattttttaagttataggtatgaagtatctttgaaaggaaagaaatttctagattatatgtatatgtatgtgtatatttatatgtatatgtgtgtatatgtatgtgtgtatatataatatgtagatactgttttcaacaaaaaaattattagagtcaaaatagtaccatctccagatgtttttatttagcttggtatctaaaatcattttaggtgactcattcccatgtgtggaaaattattaaaatttgttgtctacatctgtggtattcagtatagtagctgctagctacttaacttttaatcagttataattaaacgaaatttaaaattcatttcttgcatcatactagctacatttcaaatgctcaatagacacacttgcctagtggctactttattggacagggcaggtatagaatatttccattatcacagaatatttaaccagacagcattgatctaaatggtgttttttttttttaactggagtgcagtggtgcaatctcagctcattgcaacctctgtctccaaggttcaagcaattttctgcctcagccttccaagtagctgggattataggtgcccaccaccacatctcgctaatttttttatttttgttagagacagggtttcaccatcttggccaggctggtcttgaactcctgacctcatgatccaacagccttggcctcccaaagtgctgggattacaggcatgagccagtgcgccagggcaagtatcttgtagagaaagtttatattatgattcagatttccatgttgcccatcttttttattaatcttatagacacttattggagcgcttattatgtcttaagtgcatgagaagtgcaaagagtgtaaagacaaaaatgatgtagccaaatcaagtggtggagacagacatttaaaacataattgcaacccaacatgaattctccagggagaggagagcaaaggacaatgaaggcagaaagaatcacgcttgcaaatccatgaacggtgtggtgtgtttgggaaactctgggtaatttatttggccctagacaagtaaaaataaggactagaaacgtatgctgaggccagatcttgaaagatttcaaataactgcagtcaggttacactccattgaatgaaaacccagttgaaactggtttaaaacacaaatgtggtgtattgatgtacaatggaaaaaatccagcactagagtggtgagcagctgtgattcaactagarctctggctgccttggtctttgtgagtctcaactctgccactttgttctggttttatcttcatgatgaataagatgtttgctgtagcttcaagctttacacacatacatggcaatgactggatgaagagaggctggccctctccaagattttctcccaagattgatgaaacttgttttctaaaaaccctcagcaaatttccctcccatcgcatcagcctagttaaggttacctgtccatttctggccagcccctgtggcctgagattatgccatgt

SEQ ID NO: 94298 - DNA, 40602 bp, Homo sapiens
cactgaccttctgtcactgttggagtaaagaacactcttcattcaggctaacttctataggcaaaacgccttttccagttcattagctgaatatcaggtgccaggggctgtgctgatttgctgaaggagaccttaccctgagaagaccagccacttccgagggtatcaccatttttttttttttttttttgagacggagtctcgctctgtctccgaggctggagtgcaatggcgccatctctgctcactgcaagctctgcctcccgggttcacgccattctcctgcctcagcctcccaagtacctgggactacaggtgcccaccaccacgcccggctaattttttgtatttttagtagagacggggtttcaccgtggtcttgatctcctgacctcgtgatccgccctccttggcctcccaaagtgctgggatcacagccgtgagccactgagcccggccagtatcaccatttcttacttctgtcttccaagatccataagctcctgcatagattaatcatgtgaatcaaaggataatgtttaggaatcaccctcccatatcccacccctgtgttttccaaggcttgatgctggcgctgatctctgtgattccctgggttgactgtttgggaaggatgatactatggtttggatctgtgtccccaccaaatctcatgttgaaatggaatccccagtgttggaggccggacttggtgggaggtgttaggatcttggggatggacccctcatgaatggtttagtaccatccccatggtgatgagtgagctcacaagagatctgggtattttacagtacgtggcaaggccgggcgcggtggctcacacctgtaatctcagcactttgggaggccgaggtgcattggatcgcctgaggtcaggagtttgagaccagcccggacaacatggcaaaaccctatctctactaaaaatacaaaaactagctgggagttgaacccaggaggtgaaggttgcagtgagccaaaatggtgtcactgcactccagcctgggtgacagagggaaactccatctcaaaaatttaataataataaaataaaaaaatagaagtgtgtggcacctcccgtcctctctctcttgctcctgctttcgacatgttatgtgcctgctccctcttcaccttccgccatgagtggaaaagctccctgaggccttcccagaagctgagcagatgccagcaccacgcttcctgtacaacctgcagagccgcgagccaattaaaactcttttctttataaattacccagtctcaggtatttctttatagcaatgaaagactggcccaatatagatgggggaatttctagggkcttccatttcttcttcccaccatcaaagctttcacactacagatcagggaagccaaagcattgtgtctgccattttatgagaatgtcgatttcaacttcactctcaaggcctgaggaaggagccacacagggtctttagagtcccgttgacccactgtgtgatggtctttaggtgaaccctccgttcgttacctgacagccccaagcacaccagtcagaccatgattcacggtgacctgtgtgtgcctccaaattaggattgattcagagtcagagtccagtagccttttctctttctctaatccccagcgaccatggatattggcctttaggagaaactgggaggaaggtttacagtatgtactttgactagtatcggtgagtcctccctgagggaaaagcatccgctacatggaaggggttccaagactgagaactggctcaggactggtaacaggtgtgaggctttaggggtggacgtcgctggtgcttcacccagatctcctttgcaggcactgagcactcattcttaagcagtgttggctgcttgcagatgccacattctcaagagacttggtcttggctgggcgcagtggctcacacctgtaatcccagtactttgggatgccaaggcaggcggatcacacgaggtcaggagttcgagaccagcctggccaacatggtgaaaccccgtctctactaaaagtacaaaaattgaccaggcacagtggctcacgcctgtaatcccagcactttgggaggccaaggcaggcggatcacgacgtcacgagatcgagaccatcctggctaacatggtgaaacaccatctctaccaaaaaatataaaaaattagctgggcatgttggcgggcacctgtagtcccagctacttcggaggctgaggcgggagaatggcgtgaacccgggaggcagagcttacagtgagctgagatcgagccactgcactccagcctgggcaacagagccagactctgtctcaaacaaacaaacaaacaacaacaacaacaacaaaaagtagctgggtgtgatggcaggcgcctgtaatcccagctactcgggaggctgaggcaggagaatcctttaacccgggaggtggaggttgcagtgaggcaagatggtgccactgcacttcagcctgggtgacagagtgagagcgagatttcatctgaaaacaaaacaaaacaaaaaaaacaaaaaacttgctcttgacctgagaggaacgtgttttactaggaaagtcatgaaactctcacccctggagaagcccatagacaaagattagaggttaaaagttcagatcctgtctctgtgatgggatccctctgaagtgatagcctcacttggctccttcctctgccccatactgctttcatcactctctgtcttctgaaagcaaaccctcaaacagttcatgagcatctgaatccctgcctcaggctctgcttctgggaaacctgagcccaggccctctgctgccccactgtggtgactctggttcctgctcaccagacctagagatggtatcattacatacaccaagcaacgctctcttggtgcttctcatcacacaggtaagaggaattgaaaagaactcaggtgatgagggtcgtgctaatgggactctcattagtggctccgtggaaatttctgttcttaaggggaaaagaggagcacggccgagtctctcctgaggttgctgctaagatgttggctggggctgcattcatctgaaggagggactggagttggagggcccgagtccgaggtcctacaggttttgtttttggtttgccttccccatacacaggcagctgctccaggaggactttggaagctggggaatgtgggtcattttgtggagtggttgatttttttattgtttctttttgttttttgagatggagtatccctctgtcacccaggctagagtgcagtggtgcgatctcggctcactgcagtgtcccctcctgggttcaagcgattctcctgcctcagcctcctgagtagctgtgattacaggcatgcaccaccatgcccggctaatttttgtatttttagtacagatggccaccatgttggccaggctggtcttgaactcctgacctcctgcctgaggtcatccacctgcctcgggctcccatagtgctgggattacaggcgtgagccaccatgcccggccgaggagttgggttttgaagagaaagcaagtagggtgtggtaggacggtgggtgtggagtcaatgtaagtgatgcatttttttatagacagggagggtgagcatgtttataagttggggatctagatgggagggaagagagatagagggaagagacagtgaggaggaggaggaggaccaggagagagagagagacatcaaaaagtataggggagacagctgggtgtggtggctcatgcctataatcctagaactttgggaggccaaggtaggaggatcacttgagtctaggagttcgagaccagcctgggcaacaaagcaagaccctgtctcaataaaaaaaaaattttttttaagatatagacgagaaacagagaaaggttaaaacagaaacccaagcaagtgattggcatgaattacatccggtgcccactgaaaggaaacttctcgcaaccaaacccttgtgtatacagatggggaaactgaggctctcagagacagagaaactgacttctcaaagtggtggtgtgagaacttatttatttatttgttaattttgagacagagtctccctctgtcaccccagctggagtgcagtggtgcaatcacagctcactgcagcctccacctcttgggctcaactgatcttccctcttcagcctcctgagtagctgggaccacaggtgtgcaccaccatgcctggctaatttacttctactttttatagagacgggatctccctatgttgcccaggctggtcttgaactcctgggctcaaggaatcctctcgtctcagcctcccaaagtgctgggattataggcgtgagtaaccatgctcagctgttttgtttgctttttttttttttttttttttctttgagaaagagtcttgctctgtcacccaggctggagtgcagtggcgctatcttgactcactgcaagctccgcctcccaggttcacaccattctcctgcctcagcctcctgagtagctgggagtacaggtgcctgccaccacagccagctaatttttgcattttagtagagatggggtttcaccatcttagccaggctggtctcgaactcctgatctcaggtgatctgcccacctcggcctcccaaattgctgggattacaggtgtgagccaccgcgcctggccattgttttgctttctgagacaggggctcactctgtcacccaggctggagtgcagtggcacaatcgcagcttactgcagccttgacttcccagtctcaggtgatcctcccacctcagcctcccggtagctgggactacaggcgtgcactaccatgcctgggtaattttttctctctttttgtttttctttgtaaagatggggttttgtatattgcccgggctggtctcaaactcctgggctcaagtgatcctcccacttcagcctcctgagtagctgggcacacaccaatatgcccggctggggtttctattcttcatttccgcactatatgtgagatgaaggcagtccacgtgtgcacatagtaagtcaacaaaaacaccttgaaaagccctgggtgtcaggccccttctgagcacaggtggcctagggatgaactaaaaataaacatgactaatatttatcaactgtttaaaatgggccaggcattgttccaagactttccacgtagtaactcatctatttctcttagcatatttacaagggtgcccattctttagagatgaggaatctgagtcactgtggatttaagtcatttgctcagggtcacagatggatatgcaaattagagagtctggggtgtggaagacagtgcacagggtcctgaccaggctagaaaggccccaggcccggcatgggtcatttccaagctgaatcctaatggagcagtgggtaggagactgttagggggaaagtaggcaggtgcatctggtgggggagacagtctaggcaaaggccaagaggcaggagcccgctgggctcattttgtgagagctgcaggggcttgtgggagacggagaggggaaaggcgtcagaggctgaatggaagagcgtgctccagggatgaggggcatgaggtctaagccccaggctgctcttgatgtgtgatcacccaccagggaggcgagggagtcagctggcctttctctcagcaccccctgctctcatcctctgccccacgtcccgcatccgtgcagcagtggggcgcggcacccggtacctggggtgcagagggagatttcgggggacaaagtggagtgggctgggggctggagaaaggatgggaggcatctccagtgtcagagctagaggcagcggtgagggaggaaggtgagggccagcggggcagggttgggagctgggttccacttcctcctcctccccttcccgccctggcctctggcttcaccaatgatctggtaaaggggaaattcttgagtgtaaagtccagcaggtggaaggactaggcctgggactcctgggtccccggcagtgtctggaggcatggctggggctggcgggggcctcggggtctgggggaacctggtgctgctggtaagtgctccccgcccagagcgggctcccaaggcagggactcccaggtctgagggagaaggagctgggtgcctgcacctcgatcttgaggaagtaggtgctgaagatcccctggagaaggaagagggcttcaggcttggcagagactgtaggagagtcttacacctgggctcttagatactgtcgtgtctgctgcgggggacaccagcttcacccgggcccttagacattgtcgtgtctgttgtgggggacaccagcttcacccgggcccttagacactgtcgtgtctgctgcgggggacactggcttcaggcaacacacagctgtgctcacggacaggaagcagcccctcctccctcaaaccaagagtccagaccccagcccctcctccctcagacccaggagtccaggcccccagcccctcctccctcagacccaggagtccagaccccagcccctcctccctcagacccgggagtccaggcccccagcccttcctccctcaaaccaagagtccaggcccccaacccctcctccctcagactcaggagtccagacccccagcccctcttccctcagactcaggggtccagacccccagtccctcctccttcaggcccaggagtccagacccccagcccctcctccctcagacccaggagtccagaccccagcccctcctccctcagactcaggagtccaggcccccagcccctcctccctcagacccaggagtccagaccccagcccctcctccctcagacccgggagtccaggcccccagcccttcctccctcaaaccaagagtccaggcccccaacccctcctccctcagactcaggagtccagacccccagcccctcttccctcagactcaggggtccagacccccagtccctcctccttcaggcccaggagtccagacccccagcccctcctccctcagacccaggagtccagaccccagcccctcctccctcagactcaggagtccaggcccccaacctctcctccctcaaaccagaggtcgagacccccagcccctcctccctcagacccaggagtccagacccccagcccctcctccctcagacccaggaatccagacccccagcccctcctccctcagacccaggagtccagaccccagcccctcctccctcagactcaggagtccaggcccccaacctctcctccctcaaaccagaggtcgagacccccagcccctcctccctcagacccaggcccccaggcccccaggccctcctccctcagacccaggagtccagaccccagcccctcctccctcagaccctggagtccaggccccagcccctcctccctcagaccagaggtcgagaccccagcccctcctccctcagacccaggagtccaggcccccagcccctcctccctcagaccctggagtccaggcccccagcccctcctccctcagaccctggagtccaggccccagcccctcctccctcagactcaggagtccaggcccccaacctctcctccctcaaaccagaggtcgagacccccagcccctcctccctcagacccaggagtccagacccccagcccctcctccctcagacccaggaatccagacccccagcccctcctccctcagacccaggagtccagaccccagcccctcctccctcagactcaggagtccaggcccccaacctctcctccctcaaaccagaggtcgagacccccagcccctcctccctcagacccaggcccccaggcccccaggccctcctccctcagacccaggagtccagaccccagcccctcctccctcagactcaggagtccaggcccccaacctctcctccctcaaaccagaggtcgagacccccagcccctcctccctcagacccaggaatccagacccccagcccctcctccctcagactcaggagtccaggcccccaacctctcctccctcaaaccagaggtcgagacccccagcccctcctccctcagacccaggartccagacccccagcccctcctccctcagactcaggagtccaggcccccaacctctcctccctcaaaccagaggtcgagacccccagcccctcctccctcagacccaggcccccaggcccccaggccctccaccctcaggccaaggttcctgatccccaaccttggtttttttctcccttcccagtctgttcattgctctctgccctcggttttccaaggacatatatttcaggaaatgaaatcattaattttatctctcagccttatcgggtggagccaaccccagctccctaagctctgctcctgccatgctcccccttctctcctcgacccaggaaagacggtcgaggtcgtgacagcccagcctaacrccggcccctccttcccatgcaagggtgactcatggggcggggaccagccgctcctcccagcccctcggcctcactgggcggaggagtggttgagaggctgactccgttttctctgggttccctccagggcctgtgcagctggacaggggccagggcgcctggtgagtgacccctgcctgaactcactgcccactcgaagaggtgggaccgcaactgccgtragcctctggggggtccccgtggggtccagtggtccatggtaggggtttatgagcgccgttgtttctggacttggggcgtgagctcaggggttgggagggattgtactgacctggttccctttttgtcagaccttccttcccaattctcagcccccaacccagggaggaacctgacagtggagactcagaccaccagctccatctccctgagctgggaggtccccgatggcctagactcacagaactccaactactgggttcagtgtactggagacggcggcacaacagagactcgaaacacaacagccaccaaygtcaccgtggatggccttggacccgggtcattgtatacgtgttctgtgtgggtggagaaagacggagtaaatagctctgtggggactgtcactactgccacaggtaagaggcagccactgctttatttttatttcttttataaggacagtggtagggggtggttgagagctgacaaaatgcgacaggttctttagttggatagaaacacagtggaagccacacgtgagaatttcaattttctatcagccacataaaaataagtaaaaagaaactggtcagcctgtctctacaaaaaaattaaaaagtagctgtggtggcgtgttcccgtggtcccatctactcgggaggctgaggtgagaggatcgcttgagcccgggaggcagaggttgcagtgagctctgattggaccgctgcactccagcctgggcaacagagagaaaccctgtctcaaaaaaaaaaaaagaaaagaaaacaaaagaaaacaaaagaaaagaaaaacaaactaaattactatgagagattttatgtagtccatcagatacaattttttttttttttgaggcagagtcttgctctgtcgcccaggttggagtgcagtggcatgatcttggttcactgcaacctttgcctcctgggttcaagtgattctcctgcctcagcctcccgagtagcagagactacaggcatgtgccaccatgcccaactaacttttgtatttttagtagagactgggtttcgccatgttggccaggctggtctcgaactcctgacctcaggtgatccgcctgcctcggcctcccaaagtgcggggattacaggtgtgagccactgcacctggcagatacaaggtattttcattttgacttgtaatcaatataaaaacgatcattcaatatatacaccaagtatatactcacacacacacaaatatatataaaggatcaatgagacagttgacattcttaatttcatacgaactcttcgaaagccggtgtggatcttmcactaacggctcatctcatttcacaaaagccacctcacggtgctcaacactcacgtggaactcgtggctgccacactggacagtgcagagctgggcctccctgcctctacctgctggatgcaacggttaaggaagggctggaaagtttgagggccagaaactacaactgattttccctcctgtgctggttttcagctcccaacccagtgaggaacctgagagtggaggctcagaccaacagctccatcgccctgacctgggaggtccccgacggcccagacccacagaactccacctacggggttgagtacactggagatggtggcagagcagggactcgaagcacagcayacacyaacatcaccgtggatggacttgaacccgggtgtttgtatgcgttttccatgtgggtgggaaagaatggaatcaacagctcccgggagactcgaaatgccaccacaggtgagaggcagtygccatttgttttgctcttacttgtttaaggggcagtaggcaggagaacgtagcggatttctattccatagtccctctgggccacattgagccaggtactcatgtccacatcctggggcagtctcagctcaggagatgaagaaggaatgaatgtccatggtacctccagctgctaagctggggccggtctgtgtctaggactctctagaatgtaccttcctgcaccaagaggaatgtgtaggggccaaggcatgttacctgagctttcaaggaattagatactgtgagtggggacactctgaccctctgactcttcttctagtccccagctgcgtcacatattgaggatggaaactcagatcatcagctccatgatcctgatgtggagagctccctctggctagatctccattgtccgatatggtagccaccagccacacatggctattaaatttaagctcgttaaagttgcatgaaactgcaaattcagtttcacatttcatatgtttgaaagccctgttgaaggrcttccatttccttctctgttctcctaccatactggaaggtgggagagcatttccatcgttgcagaagctcagttggaaagcgctggctcaggtctttgttactcaaagtgtggtccatgtgtgggcagcatccgggtctctgagagctgatggaaatacattggcaagtgacactggtgggggagaaaaagggtgggggggagtgcagtctctcagctccatcctagccctgctgagtgagaacctgcatttcacaaggtcccctgtgagatgtgcacacagcaaagaatgagaagccctggtctagaccataaactctgcatctactggcaccagctgttgagggacaactaggaactctgatgatcaaaaatgcccacttggccaggcatgttgcctcacgcctgtagtcccagcactttgggaggccgaggtgggaggatcacctgaggtcaggagttcgagaccagcctggccagcatggtgaaaaaatataaaaataagccgggtgtggtggtgcagacctgtagtcccacctactcgggaggctgaggcaggagaatcgcttgaacccggacggcggaggctgtggtgagccgagatcgtgccactgcactccagcctggatgacagacagagactctgtctcgaaaaaacaaacaaacaaaaagctcactggctgcccccgttatgttctgtagtcctgctcatattagatctttcttcctaatttctcagctcacaacccagtgaggaacctgagagtggaggctcagaccaccagctccatctccctgagctgggaggtccccgatggcacagacccacagaactcsacctactgcrttcagtgcactggagatggtggcrgaacagagactcgaaacacaacagacaccagagtcaccgtggatggccttggacccgrgtcattgtatacgtgttctgtgtgggtggagaaagacggagtaaatagctctgtggagattgtcactagtgccacaggtaagaggcagccgctgttttatttttatttcttttataaggacagtggtagggggtggttgggagctgacaaaatgtgacaggttctttagtccaatagaaacacagtggaagccacaggtgagaatttcaattttctatcagccacataaaaataagtacaaagaaactggtcagcctgtctctacaaaaaaaataaaaaagtagctgtggtggcgtgttcccgtggtcccacctactcgggaggctgaggtgagaggatcgcttgagcccgggaggcagaggttgcagtgagctctgattggactgctgcactccagcctgggcaacagagagaaaccctgtctcaaaaaagaaagaaggaaggaaggaaggaaggaaggaaagaaagaaactaaattactatgagatattttatgtagcccatcagatacaatttttttttttttttttttgagacagagtctccctctgtcgcccaggctggagtgcagtggcgcaatcttggctcactgcaagctctgcctcccgggttcaggccatcctcctgcctcagcctcccgagtagctgggactacaggcgcacaccgccacacctggctaattttttgtatttttagtagagacgggtttcaccgtgttagccaggatggtctcgatctcctgaccttgtgatccacccgcctyggcctcccaaagtgctgggattacaggcgtgagccaccgtgcccagcccttttttttttttgggacagagtctctgtctcccaggctgaaatgtagtggcatgatcttgactcactgcaacctccacctcctgggttcaagtattctcctgcctcagcctcctgagtagctgggactacaggcatatgccaccatacctggctaacttttgtatttttagtagagacggggtttcgccatgttggccaggctggtcttgagctcctgacctcaggtgatcygcctacctcagcctcccaaagtgctgggattacaggtgtgagccactgcgccyggcagatacaaaatattatcattttgacatgtaatcaatataaggaaaggatcattaaatatacacactgagtatatacccacaaaatatatatatatatgtgtatgtatatatatgtgtgtgtatatatatgtgtatgtgtatatatatgtgtgtgtgtgtgtgtgtataggatcaatcagatagttgacattcttaattcttaatttcatacgaactcttcgaaagccggtgtggatcttmcactaacggctcatctcatttcacaaaagccacctcacgrtgctcaacactcacgtggaactcgtggctgccacactggacagtgcagarctgggcctccctgcctccacctgctggatgcaatggttaaggaagggctggaaagtytgagggccagaaactacaactgattttccctcctgtgctggttttcagctcccaacccagtgagaaacctgacagtggaggctcagaccaacagctccatcgccctgacctgggaggtccccgayggcccagacccacagaactccacctacggggttgagtacactggagatggtggcagagcagggactcgaagcacagcayacaccaacatcacygtggatagacttgaacccgggtgtttgtatgtgttttccgtgtgggtggggaagaatggaatcaacagctcccgggagactcgaaatgccaccacaggtgagaggcagtygccatttgtttgatctcttatttgtttaagggacagtaagcagtagaatgtagacgattgtctattccatagtccctctgggccatattgagccaggtactcatgtccacatcctggggcagtctcagctcaggagatgaagaaggaatgaatgtccatggtacctccagctgctaagttggggccagtctgtgtctaggactctctagaatgtggaccataatgccaaggggcaccttcctgcaccaagaggaatgtgtaggggccaaggcatgttacctgagctttcaaggaattagatactgtgagtggggacactctgaccctctgactcttcttctagttcccaactgtgtcacatattgaggatggaaactcagatcatcagctccatgaccctgatgtggacagctccctgtgtctacacctccattgtccaatatggtagccactagccacacgtggctattaaatttaaactcattaaagttgcatgaaactgcaaattcagtttcacatttcatgtgctcaaaaggcctgttgaggggctcccagtccccccttcatcctccacggtgctaatgcctaccatattggaaagtgagagactgtcttcatcaccacacaaagctcccttgagtctctcttatttttttcttttttttagagctggagtctcgctttgtcatccaggctggagtgcagtggcaggatcgtagctcgctgcagcctcaaattcctgggctgaagcaatccgccgacctcagcctcccaagtagcagggactacaggcgtgggccaccatgcctgactaatttattttttttagagatgaggtcttgctgtgtggtccaggctggtctctaactsctggcctcaagcaatctccctacctcagccccacaaattgctgagattacaggcatgtaatctcacatgaaatgtgaaactgtgctgggccattgggcctctcttaggcagtaaccccaggcataaaggcttcacctttatgacctaatcttgcaagggccctacctcttaatgctattccattggagatttttattttgttttttttgtttgttttttttktttgttttgagacggagtctcgctgtgtcgcccaggctggagtgcagtggcgcgatctcggctcactgcaagctccgcctcccgggttcacgccrttctcctgcctcagcctcccgagtagctgggactacaggcaccagccaccacgcccggctaattttttgtatttttagtagagacaggtttcaccgtgttagccaggatggtctcaatctcctgacctcaggtgatccccttgcctcagcctcccgaagtgctgggattacaggcgtgagccaccacgcccggcacattagtctgagaaacacggtctagaacatacaccctgcatctgctggcaccagcagttgaacaagagctaagatggttgagggcagtgaggggcccactcctgccccgttctgttctgtatctcygacaacataggatcttcttcctactttctcagcccccaacccagtgagaaacctccatatggagactcagaccaacagctccatcgccctatgctgggaagtccccgatggcccataccctcaggactacacctactgggtagagtacactggagacggtggtggcrcagagacccgaaacacaacaaataccagtgtgacagctgagagacttgagcccggaaccttgtacacattctctgtatgggcagaaaaaaatggagcacgtggctccaggcagaatgtcagcatctccacaggtaggaaccctcaacggccactccctgttttggtgagaggttaagaaccagcaggagcggcgtggcacctcttctgggctctggctctgtagtccgtaggctctgcagacatctgcctctccaagtccacaggacagatgtaatcacagctgggggctggctctgccctgaggaagaagagagcccatccagacttctcccgctgagtgtggggctgtggggacacaggccttttctttctttctttctccttcccttccccttccttccttccctttccttcctttcttccttcctttctcgctttctctctttcctttctttctttccttcctttctctctttctttccttctctttccttcctttaaagccttccttcctcccttccctccttgttccttcctttctctctttctctttctttccttctttctttctttttttctgtctctctctctttctttctttctctttctctttctttctttccttctctttccttccctccttccttcctttctccctcccctcctccctcccttcctttctctctttctttctcttttctctttctttcttttccttccttccttctttcttttctttctttccttcttttctttcttctttcttgagacagagttttcctttgtcactcaggctggagtgcaatagcacaatctcagctcactgcagcctctgcctcctgggctcaagcaattctcctgcctctgccttccaagtagctgtgacaacaggcacgcaccaccacacccagctaatctgtgtatttttagtagagacagggttttgccatgttgcccaagcttgccttgaactcctggcctcaagtcacccaccttggcctcccgaagtgttgggattacaggcgtgagccactgcgcccggcctctctctctctttctttcttttgagacggtcctgctctgtctcccaggctggagtgcagaggcacaatcatagctcactgcagactgaacctcccaagctcaagcgatcctcccacctcagcctccctagtagctgggactacaggcatgtgctactatgcccagctaatttgttttaatttttagtagcgatagggtctcactattttgctcaggctggtatcaaattcccaggctcaggcaaccctcccggtttagcttcccaaaatgctgggattacaggcctgagccactgtgccctgccaggaagtgtttctggatgagctgggctgcacaaggacagggcrtatcactgtgttctggactcttgaggactaggggatgtggaaatcctgactctgctccctctcccagtccccaacgcagtgacaagcctcagcaagcaggactggaccaacagcaccattgctttgcgctggacagctccccagggcccaggccagtcttcctacagctactgggtctcatgggtcagggaaggcatgactgaccccaggacccaaagcacctcaggtactgacatcaccctaaaggaactggaagctggcagcctgtaccacytcaccgtctgggccgagaggaatgaggtcagaggctataacagcaccctcacygcagccactggtgagacacagtcggttctgaacccagccctattaggatgggggaaggaaaaagatgaaaggactttgggagctccttgggaratgaagagtacccatgggcctctccagcctcaccggccggagcttaaacctgtaggtcccgttcctagtgggtgtcgtttcttagcagacagggctttccaagctgtgggacctgttttttctccctttgggaaatggactctttggggtcagggggagccctcaattgtccagcaccacctctcaggagctgacaaagtcaccagctggacaatagccaacagctggtcccagggaattagatgaagcgagagggccccacctctcagcctaggcacggtgggtcccactcatgagaaaaatcaaaatcactctggagactaggttcattcttttttgtgtgtgtgacagggtcttgctctgttgcccaggctggagtgcagtagtgtgatcatggttactgcagcctcgacctcctgggctcaactgattctcccacctcagcctcctgagtagctgggaccacaaacatgcgccaccatgcccagctcatttaaaaaaatattttttgtagagagagggtctccttatgttgcccaagctggtgtcgaattcttgggctcaagtgatcctcccgcctcggcctcccaaagcactgagattacaggagtgagccactatgcctggcctgaacctggaactctttaatccttggtcatttgggctaaaaagatgaaatttatcagctccctctacaaacgtggtgtgtctagagtgagaagacaccctacctggggttcctgtgggaaagaaaatacagagatcagatctcgagggccatgagaggtggaggactacaaatcccatcacaccatggggccatgacttcataagctgaagcgatacagagaatccatagcctcatgggaactgtagtttcagtaggtggaattggtgtgcatttgggaagaacagaaagatgacagggtgggacccagggctgtagccaggggacggagagggctaggagattctggtccccatggtctttgggtatctagactctttcctgtggttcagcctccttagccactggagccatcaataatggatatctcagctttgctgtgggggagaggcagacaggctggggtaggagggtcttcgaggatacccccttaggcctctgttctcacttctcagctcccaatgaggtcacagatctcmagaatgaaactcagactaagaactcagtcatgctgtggtggaaggcccctggagacccccactctcagttgtacgtatactgggtccagtgggccagcaagggacatccccggagggggcaagatccccaagcgaattgggtcaaccagaccagcaggaccaatgagacgtggtacaaagtggaggcyctggaacccgggacrytgtacaatttcaccgtgtgggcagagaggaatgacgtagccagttccacgcagagcctctgtgcgtccacatgtgagaatcmccttcctgccttcaagtggtgaactgggcttagctcacagtccttgcgagctgagagatgaatggaatacaaattccatcaggccacaggccatgacttcatgagctgcagtgatggaggagcccaaggcctcatgggagttgtagtttaaaaggacttatttgtgtccattcggggaggacagaaaaggagggaagatgaggtagtttggatttggcgaggaagggatgggctcgtctcagaaaactgggggtaggggtggagggggtggaaagccaccttggatggcactgctgacctcttgcttccttcrcccagacccagacacagtcaccatcacttcctgtgtcagcacctcagcgggctatggagtcaacttgatctggtcctgcccccagggaggctacgaggcctttgagttggaggtgggaggacagcggggctcccaggacagatcttcatgtggggaggctgtgtctgtgttgggtctcgggccggctcggtcctacccagccaccatcacgaccatctgggacggaatgaaggtcgtgtctcactctgtggtctgccacaccgagagtgcaggtgagcggagccgcgcgggccagccagctatgatgaaattctcggtagaccccatcaggccccattgtgaggaaatcagtgggactcttttgtttctcatttcctttgaaacatcttttttattttgtattttgagatggagttttgctcttcttgtccaggctggagtgcagtggcacgatcttggctcattgcaacctctgcctcccgggttcaagtgattctcctgcctcagcctcctgagtagctgggactacaggcacgtgccaccacgcccggctaatttttggatttttagtagagatggagtttcaccatgtcggccaggctggtctcgaactcctgacctcaggtgatctgcctgcctcaggctcccaaagtgctgggattacaggtgtgggccaccgcgccatccacaactcaccacttaaagttacaattcagtgactcttcttatattcacaacattgtgcaaccatcatcactatcaattttagaacattttcattacccccaacagaaagctcaccccgctgagccaccaccccctagttctcccattccccagcccccagccctcggaaatctctcatccactttcaatctctatagatttgcctctctgggacgtttcattaaaatgcaatcatagagtgggcacagtggctcatgcctggaatcccagcactttgggaggctgaggtggaaggatcacttgagctcaggagttcgagaccagtctgggcaacagagtgagaccccatctctacattttaaaaaattagccagctgtggtggtgtgtgtctgtagtcctagctactcaggaggctgagtcagaaggatcacttgagcccaggaggttgagactgcagtgaactatgatcggggccactgcactccagcctgggtgaaggaacgagaccctgtttcaaaaacaaaaaaaatgcaatcatacattatgtgtttctttgtgactggccactttcactgagcataatttgtttttttgtttttgtttttgttttgagactcactctgtcacccaggctggagtgcagtggcatgatctctgctcactgcaacctctgctaccagggttcaagcaattcttgtgcctcagccacccaagtatctgggatcacaggcatgtgccaccatgcttggctaactttttattttttattttttattttttgaggcggagtttcactcttgtcgcccaggctggagtgcagtggtgcaatctcggctcactgcaacctccacctcccgggttcaagcgattctcctgcctcagcctcctgagtagctgggattataggcgcctcctaccacgcccagctaacttttatacttttaatagagatggggttttgctatgttggccaggcyggtctcaaactcctgacctccggtgatccacccgcctcggcctcctgaagtgcagggattacaggcatgagccaccatgcccagctaatttttaaatttttttagtagagatggggttttgccatgttggacagactggtctcgaactcctgacctgaagtaatcctcctggctcctcctcccaaagtgttgggattacaggtgtgagccaccgcacctggcctacccattcatttttatccattcattgatccagttgatgggtcagttgagtagttccacttttgaccattatgggtaatgccgctaggaacgtttgtggataggttttgtgtggacgtatgtttttatttctcttgggtctatacccagtagtggaactgagggatcacatgggaactatacatttaactaccccccaccccgggttttatttttcctaatgtggttgtatcatcttgcagtaatcaatggggtacctgaaaaactttggagcttaagctttggaaagacctggccatgtaccaagaccatggccataagcttcactttgccccatcaatcacttcctaggaatagggtttcttatgagattgggtctccaatctggagagagactgagggttgatgtggtgaccagtggatgctgtttgaactgggctttgccagaccccattgcttagaaagttctctcccttagtaacaaggatccctgagagaacaggtcctctagtccaattctgtgaggccaagtccattctgtgaggccaagtctcccgtacaggttgtaagacccttcagttccctgtcaacaaacacactcttcccaggattgctgagaagctgcagcttgggggccttcaaggctgatgaagatgggccataggcttgagcctaccctaagacgagacatctaatgacagatcttgggagaactgtgccatcagagcctgagagcacccatagacaccaccagatcagccaggcgcggtggctcacgcctgtaatcccagcactttgggaggccgaggcgggaggatcacctgtggttgggagttcgagaccagcctgacgaacatggagaaaccctgtctctactaaaaatacaaaaaattagctgggcgtggtggcgcgtgtctgtcatcccaactactcaggaggctgaggcaagagaatcactagaacccaggaggcggaggttgcggtgagccgggattgcaccattgcactccggcctgggcaagaagagcaaaactccgtctcaaaaaacaaaccaagaaaaaaaaaaaagacaccaccagatctgggtaggctccgctgccggggagtccttccccagccagcaggacctctgagaagatgaagcctcaatctggggagaacagaagccgtccatgccagggatgatttcacaaccagcaaagtgtttcccccgcctcggcactacagacgtttccggctagatccttctttgttgtgggggggccgtcctgcgcattgtaggatattgagctgcacctctgcttcccacccactatgtgccagcagcactyccacttccaagctgtgacaaccaaaagcgtctccagacattgcccggtgtctctttgggagcaaaatcacccttgttgagaaccactagtctaagctaaggaaggcaagaatcacttttttgttttgtttcgttttgttcttttttgagacagggtctcactctgttgcccaggctggagtgcagtgatacgatcatgcccaccacagcctccacctcccaggctcaagtgatcctcctgcctcagtcccctgagtagctgggactacaggcatgtactaccatgcccagctattttgttggggttctttttgttttgttttgctttctttttcttttttttttttttgagacagagtctcactctatcacccagtctggagtgcagtcgtgcaatctcagctcactgcagcctccacctcccgggttcaagtgactcttatgctcagcctcctgagtagttgggatgacaggtgtgcaccaccayacccagctaacttttgtttttttagtagagactgggttttgttatgttgcccaggctggtctcaaactcctgggctcaagtgatccacccacctcagcctcccaaagtgttgggattacagggktgagccaccatgcctggccaggagtcactcttcagcaaccaggtcacctgtgaaaatgatggayagttgacccttgaacaattgtcccctacacagtagaaaatctgcatataacagccgggcatggtggctcatgcctataatcccagcactttgggaggctgaggcaggtggatcacgaggtcaggagatcaggaccaccctggctaacacggtgaaaccccaactctactaaaaatacaaaaaattagccaggagtggtggcgggcaccggtagtcccagctactcaggaggctgaggcaggagaatggcgtgaacccgggaggcagaggttgcagtgagccgaggtcgcaccactgcactgcagcctgggtgacagagcaagactctgtctcagaaaaagaaaaagaaaaaaaaatctgcacataacttttgactcccccaaaacttaactactaatagcctactcttgattggaagccttaccaataacataaacaacatacatttcatctgtaatatgtactacatactgtattctttttgtttgtttgtttgtttttgagacagagtcttgctctgttacccaggctggagtgcagtagtgtgatctgggctcactgcaagctccrcctcccgggttcacgccattctcctgcctcagcctcccgagtagctgggactacaggcgcccaccaccacgccctgctaattttttgtatttttagtggagatggggtttcaccgtgttaaccaggatggtctcgatctcctgacctcgtgatgtgcccatctccgcctcccaaagtgctgggattacaggcgtaagccaccgcgcccggccgtactatatgctgtattcttataatcaagtagctaaagaaaaaaatgttactaagaatatcctaaggaagagaaaatgtactcgctatttattaagtagatcatcataaaggtcttcctccttgtagtcttcgcgttgagtaggcggaggaggaggaggaggtaggagaggggctggtcttgctgtctcaggggtggaggaaaatccatgggtaagcgcgtaagtataactggaccgacgcaattcacaccgtgtgatgttcgggggtcagctgtctttggaccaggctcctggggaagaggaaaggctgggcagggttggagacagatgagcagctcagacctgcgctctgagggttcccgatgcctcctccccacaggggtcattgccggagmctttgtgggcatcctcctgtttctcatcctcgtgggcctgctgattttcttcctgaagaggaggtgagactcagcacagggctgaccgcctggagggtgggggctggagaagaaggaggaggaccgctggttgcagcctcaccccctgagcctctcatcctaacgtccttttcccaggaataakaagaagcagcagaaaccagaactcagggatctggtctttaggtgagcagaaggtctkgggggtgcattggaaagaatctggtcaaatcaaggggtgtttgctggctgccagctaggtcagagggtggatcaatgcatttacccacaaaggtctcagaaggggcccatgcctctgcgacagggaccacggcccttccatcgtgactcactccccaagcagcctgggccagcgaattcagttctggtctcaactcccggacattcattcattcagcagatatcagctgagcaccagcatgtatcaggcactgttccaggtgccaaacaaacagcaaatgaaaccaagattcttgcccgccaggggcttatattctagtacaggagatatcaataaacaagattgctgggtgcggtggctcatgcctgtaatcccagcactttgggaagctgaggcaggcagaccacaaggtcaggagatcaagaccatcctggctaacgtggtgaaaccctgtctccactaaaaaatacaaaaaattagccaggcttggtggcgggcacctatagtcccagctacttgggaggctgaggcaggagaatggcgtgaacctgggaggtagagcttgcagtgagttgagatcacgccactgcactgcagcctgggtgacagatcgagactccgtctcaaaaaaataatagtaataaaaaattaaaaaagatcataaaaaatatgatataaactttcagacagggccaggcatggtggctcaygcctgtaatcccagctacgcaggtggctggggcaggagaatcacttgaacccgggagcagaggttgcagtgagctgagattgcaccattgcactccagcctgggcaacagagtgagactctgtctcaaaaaaaaattatatatatatataatttataatatatataatatataatatataaatttataatatataatatattatatgttatatatataatatattatatattatatatattatacaatataaaatatacattatatataatataatatataaattwtawaatatataatatataaatttataatatataaaatatataaataaacttggagacaaggcaaaaggaggggataggaagggtagaggaatattgtgatattctttttttttttttttgaggtggagtcttgctctgtcacccaggctgaagtgcagtggcatgatctcggctcaccrcaacctccgcctcccgggttcaagcaattctactgcctcagcctcccgagtagctgggaatacaggcatgcaccaccacgcccagctaatttttgtattttttagtagagacagtgtttcactatgttggccaggctggtcttgaactcctgaccttgtgatccacctgcctcggcctcccagagtgctgggattaccggcgtgagccacagcccctggcctattttgatattcttctaatgtgaaaattagaataaattagagagaaaatcagatgaattattttattttattttattttatttattaatttgtcaagacagggtctcactctgtggcccaggctggagtgcagtggcgcaatcatagctcactgcagcctcgacctcctgggctcaagtgaccctcccatctcagcctccccagtagctgggaccacaggcacgcaccacaatgcctggctaattttttaattttttgtagagatggaggtcgggggggtggtcttaccaggttgcccaggctggtcttgaacttctggccccaagcagcccttccacctcggcctcccaaagtgtttgcatcacaggcgtgagccgctgcacccagcaggaatattttcggcaggatattcaaggaaagctttgctaacaagatgactaagaggaagtcatctgagtacaggcctacgcaagtgggagaggagccgagcatgcatctgggaaaggcgctcccaggacagggatgggcgcgtggagggcctgaggcaacagcacacgtgaggttcagagaacatcgtgcgtctccgactgagcagagtgaggaaggggagggcagtgggaagtgaggtcagagagacgtcagtggggccacagcaggcacaggcctgtagttgaaagttaggactttggatttattgtgagctgagagttcttgggagattttgaataggctagtgacacagtctaacatgtttaggaagaagtctaacatgtggaagagatttgtaataatccagacaagaggccaggcgtggtggctcacgcctgtaatcccagcactttgggaggccgaggcgggaggatcacttgaggtcaggagttcgagaccagcctgatcaacatggcaaaaccccgtttctactaaaaatacaaaaattagccgggcatggtggctggcacctgtaatcccagctacgcaggaggcagaggcaggagaatcacttgagctccagaggctgaggttgcagtgagctgagatcacaccactgcactccaacctgggcgacaggatgagactctttctcggaaaaggaaaagaaaaagaaagaaagtgaaactacaggaatgggccaaaccctgtaagaagtgtgcgtccagcaagaaaagtggcttggggttggacactggggaacagttaccttttaagacggacagaggaggaggggyctgcccaggaaatgaacaagcagcagctgggtaggtgggggccaagccagggcygggtgttccggaacagtgcagatccaggagaaaaggcaggcacaggcagtggtgctaaatgctgctgagcagtcaggccggtgggggctgaaacgtggcctttgcaattacagacagggaggccacgacgattttggagaaaggtgttccctggagtagtggatatagactccaagccatggtgataggatgacaggaaggagaaaaaaactggtctgcatgagaagtgtaagtgtagggctgtctgagtatgtttattattttttattttattttattttatttcttattttttgagacggagtctcgccctttcacccaggctggagtgcagtggtgcgatctcggttcacyacaacctctgcctcacgggttcaagagattcttctgcctcagcctcccgagtagttgggactacaggygtgcaacaccaygcccggctaatttttgtagttctagtagagatggggtttcaccatgttggccaggctggtctcgaactcctgacctcaggtgatccacccgcctcrgcctcccaaagtgctgggattacaggcgtgagccaccatgcccagccctcaaaagtgcaagattaaaagargttacggtcttttctccctgctcccccaaaacccgtagctccccaggggacatcccagctgaagacttcgctgaccacgtcaggaagaaygagagggacagcaactgtggttttgcagacragtaccaggtggggagaggacagaggggctgagctcagtctccctccggtggcccagacccccaccccccaccccctggccagacctcacggctttcgggattaagcaaaagtagcatcacatatgtcattggattgtgcagagattcccagccatgttatctttccactcactgaartcttaaaataatggtgggtcagtcctaaagtaactctctctgcccccacccagtgagtcctttctcccctgacacctgctttcttgcctgcctgaagaagtcccatggttccctaaatcctccccagtgccccacagggcaggtggcacacacatctattctgtttttgtgggtgccatakaatctcarggtgcaacgrataaacaaggggtgatgccgaagaaggcaaggggagctcgggggtacccccgagggaaagtagagaaaatccaacaccagrtaccccctctccctgcatccccagcaactctccctggtggrccacagccagtctcagatggtggcttcggcttcagagaacaacgccaagaaccgctacagaaatgtgctgccctgtgagtctcgggttcctgctgyttttgtcccagccctgatctagtcggcaccccaccccagtccccttctcctacccgctttgagaaacaagtcctgccccctaccgtgggtctccttttttttttcttccttttttttttttctttttttcttttttttttttttttgagacggagtctcgctctgtcacccaggctggagtgcagtggcgcgatctcggctcactgcaagctccgcctcccgggttcacgccattctcctgcctcagcctcccgagtagctgggactacaggtgcccgccacctcgcccggctaattttttgtatttttggtagagacagggtttcaccgtgttagccaggatggtctcrrtctcctgacctygtgatcygcccgcctcggcctcccaaagtgctgggattacgggcgtgagccactgcgcccggccccccaccttttttttttctttgagacagagtcttgctgtcacccaggctggagtgaagtggcaccacctccgctcactgcaacctccacctctcgggttcaagcaatcctcccgcctcagcctccctagtagctgggactacaggcgcccrccaccatgcctggctaatttttgtatttttaatggcgaccgggtttcaccatgttggccaggctggtctyaaattcctgacctcaggtgatccacccacctcagcctcccaaagtkctgggattacaggtgtgagtcactgcacccggctgtgggtccctttgagagtcctcctggcctgctccctgcagctgaggtccctccgcccctctcagtccctgtgtagctcccaaggtctgcctgcgtctcggcatgacttttgtccatgggtcttggtcttgtctctgtgcctctctgggtctctctgcctgtggtcttgtctctgtgcctctctgggtctctctgcctgtggtcttgtctctgtgcctctctgggtctctctgcctggctaatgctggcctcttctcctagatgactggtcccgggtgcccctgaagcccatccatgaggagccaggctctgactacatcaatgccagcttcatgcccgtaaggtcgtggttgggattgaaagggtgcccagcacgcctggagagataagagctcggggatcaactaaaggcccccctgacccgcctgccttcctcaaccagggtctctggagcccccaggagttcattgcaacccagggtcccctgccayagacagtgggtgacttctggcgcctggtgtgggaacagcagagccacaccctggtcatgctgaccaactgcatggaggccggcygggtgagagatctgagtcctgggtgctgactgggtgcaggaccccgccccgaacactcatccaatgtagaccccacacccagaccttacggattcctccagggtaaccccaggcrtcttcagtgtagacctgttccccactctccccccagcccatctgctggttcacatttggggcctaaagcagaccccacagacctgggtaagaggagttgtgttctctgaccyctcctcctcccccaggtgaagtgtgagcattactggcctctggactcgcagccctgcacccatgggcacctgcgggtaaccctggtagrtgaggaagtgatggagaactggacggtgcgggaactgctgctyctccaggtgcgtgtgtccagccccgtcctggccctcagccttcccctgtgacatatgccatgcatccaggaccctccaccaactccarccttccacccactcctctgaggagctgcagtgtgccccagggaacccgctcctggtgctagaagccaggtcctccctacattcatctccagagcctgtgagtgctccctccttccaggtggaggagcagaagacactgtctgtgcgccaattccactaccaggcctggccggatcacggcgttccctcctccccagacaccttgctggctttctggaggatgcttcggcagtggctggatcagaccatggagggaggcccacccattgtgcactgcaggtggggaccagcccaggaccctctcccttgagagaaccgctcccttggggctcagacagttgtgttagacgggaccctgggaacgtacaggggaggtgaagagggagagaaggaggaggtggatgtggaagataaaggggggcgtgaagcagattaagaaaagaaaggggataaggatgaaaagatgggaacgaaagatgaaaaggcaggccaggagcggtggctcatgcctgtaaatcctagcactttgggaggccaaggcgggtggatcacttgagttcaggagtctgagaacagcttggccaacatacaaaccttgtctctactaaacatacaaaaattagccgggtgtcgtggcgggcacctgtaatcccagctactcaggaggctgaggcaggagaatcacttgaacccgggaggcagaggttgcagtgagctgaggtcgcaccactgcactccagcctgggtgactctgtctcgattaaaaaaaaaaggaaaaaaagaaagatgaaaaggtaaaggcagagaaggttgaatgcagaagagaagggagaaaggatgaagccacaggatggggatgtggccacagattctgagaaacactggagacacttccctgtgctggagtgcagggcctcccccatcaactgcttccctgatatttattttattttatttattttattttattttattattttattttattttatttgagatggagtctctccctgtcgcccagggtggagtgcaatggcgcaatctcagctcactgcaacctctgcctcccgagttcaagcaattctcctgtctcagcctcccgagtagctgggattacagctgctcaccaccacacccagctaatttttgtatttttagtagagatggggtttcaccatgttggccaggctggtctcgaactcctgacctcgtgatccgtctgcctctgcctcccaaagtgctgagatgacaggcgtgagccaccgcacctgaccctttcctgatatttatgctgaagtcccgtaggtcagatttcacctaacggtaactattagggagatgaggaagagtaacagcccctgagactggggctctggtttcagtcacagtgaacatttacacagtyctactgctcctcatgacagyctcatggcaaaagggtgtcctccccattttattttattttattttatttatttatttgtttgtttattttggaggcagagtttcgctcttgttgcccaggctggagtgcagtggyatgatctcggctcactgcaacctctgcctcctgggttcaagcaattctcctgcctcagcctcctgagtagctgggattacaggcatgtgccaccacgcccggctaattttgtatttttagtagacacggggtttctccatgttggtcaggctggtctcaaactcccaacctcaagtgatccgaccacctcggcctcccaaagtgctgggattacaggcgtgaaccactgtgcccggcaatgtcctccccattttagagctgagtggatgtcatcacatcattccattagtgtgcatatccagaagcatatctagatcagccaaagcaacagagacactgaagagattagtagcttccaggccctggagggtgacaggcaatagggagagacggcctaatgggcgtggtgtctgctttaggggtgatgaaagtgttttgcaagtagatagaggtgggggctgcacagcgttgtgagtgtgacaaattgctcacgttcaaatagctatttttttttgtggagacagagtctcgctatgtcacccaggctggagtgcaacggtgcgatctccgctcactgcaacctccacctcccaagttcaagcaattctcctgcctcagcctcttgartagctgggaatacaggtgcctgccaccccgcctggctaattttggtatttttagtggagatgaggtttcttcatgttggccaggctggtctccaacgcctgacctccggtgatccgcctgcttcagcctcccaaagtgctgggattacaggcgtgagccagtgcgcccagcttaaaatagctaatttatttatttatttatttttgtgggggacggaatcttgctctgtcgcccaggctgggagtgcagtgatgtgatctcggctcactgcaatctccgcctcccgggttcaagtgattcccttgcctcagcctctcgagtagctgggactacaggcgcccgccaccacacccgggtaatttttttttttttttggtactttagtagagacggggtttcaccatattggccaggatggtctcaatctcctgacctcgtgatccacccacctcagcctcccaaagtgctgggattacaggcgtgagccactgtgcccagcctaaaatagctaattttttcactgggcacagtagctcatgcctgtaatcccagcactttggggggctgaggtgggaggatcacttgagtccaggagtttgagaccagcctgggcaacatggcaagaccccgtctctattaaaaagttaataagttagtcagatgcagtggtgcatgcctgtgatccaagctactcaggaggctgagacaggaggatcacttgagcccaggaggtcaagggtgcagtgagccgagatcatgccactgcacttcagccttcgtgacagagagagatcctgtctcaaacaaaacaaaagactaatttttgtgtttaaaggaattactaaatgattggctggagagttcctcttcctgtatttgaaccccggctctgccacttattagctgagtggcctggggaatgggacttcacctcactcagcctycatttccccatttgtacaatggagctagtacatccgacttcttaggtttgggaggagtgaagaaggcccatcaggcacttagaacagagcctaacagatggaaggaactccaggcagttttgttgttgttgttgttgttgtttttgagatgggagttttgctcttgtcgcccmggctggagtgcagtggtgtgatcttggctcactgcaacctccacctcctgggttcaagcgattcttcgcctcagcctcccaagtagctgggattacaggcatgcgccaccayasccggctaatttttgcatttttagaagagacggttttgccaggttggccaggctggtctggaactcctgaccttgggtgatccacyggcctcagcctcccaaagtgctgggattacaggtgtgagcaggcatagttattgtcatcattcaaacacagatccctccaatcagccatgaccccrgaccctcacactcctgccccttggtctgacccttcccttgttctgcctagtgctggcgtgggtcgcacaggaaccctcattgccctggacgtcctgctccggcagctgcagtccgagggtctccttgggsccttcagctttgtaaggaagatgagagagagtcggccgttgatggtgcagactgaggtgaggcagtccctcagcaacacaggacgggaggcagtgggacgagggaccctggggctccacgcagctcagacctggggggacgcctctcactcccrtgcctgcttcccaggctcagtacgtattcctgcatcagtgcrtcctgcggttcctccaacagtcagcccaggccccagccgagaaggaagtcccgtatgaggatgtcgaaaacctcatctacgagaacgtggccgccatccaggcccacaagttggaggtctragtgacgagggggctgggtcggcagcccaggcatcctcaagstctggacacccacttgagcccagattcctggaagagcagagggctgggctcccagactcctgggtrctgtgggaggagggggctggtatcccaaactctggtttccccaggagagagtggtcwggtgggcttcagatgagtcctatgggagctggggatctggattcctggttccctgaaggaggagagggatgatagcttggattccctaggtctttccaggatgcagaaagaaacaggctggggcctggattctgaggcaggaaggaatttgggtctggagttctggctacttgaggaccaaaggcaggaaggatcctgccttgattttacttcagaaaccaaatcagtcttctataatctggggtcggagggagtccctgtgcccaaggtctctctgcaccccaccatccacatgtatttttccttctatcccataatttattaaatcactgttctccccagagacagttgtcccatggatttctgggtctggaaataatattggattgggagtagggatgggttcctggtatctagggatcgaggcgaacgtccaggaggggactagagggacccacacatttgcacatgaaaaaatgtaggtttgggtggttgagtctctcagagaaggcagtgtccagacgtctgtgtccagggtctgggcagtatggacagggctcgctggagctaggtgcttggggacttgccttctgagcttttcttttactcttctctgttgttgttgttgttgttttgttctgtttttgtttttgtttttgagacatggtcttgctctgttgcccagactggagtgcagtggctcactgcagccttgacctcctgggcccaggtgatcttcccacctcagcctctagagtagctgccatcacaagtgcgcaccaccacgctggctcatttttgtagagacgggattttgctatgttgcccaggctggtctccagctcctgggctcaagcattcctcctgcttcggcctcccaaagtgctgaggttacaggtatgagccaccgcactggccgcctcctgggactggtgttaggggaacttagagggcgatgtctgggggctgatagctggggactttgatgctgaaccctgcagagtctgggtctccaatgggggtctggggtctcctaggtcctaggactgagtatcctggcatgccgttctttgggctatacagggtgtgtgtcgtgtgtgttggggcgggaggagtggagtggtctggacggccaacgactggaccagaaggcagaaaatgctaaagcaccaggataaacatctgtgggcgtcatcgaggttcccgggtggaggcgggaggaggggcggggcagggctttccgcctacccgagaccaaatacgggcacacacaatacacaccacacacgcgcgcacacgcacacgggcacacacgcgcgcacgggatcctgctccgctccgcggctcccccgccccggagagctccgcgatcagcacccgggacagcgccaccgcccacgtgcagggggtggggtccgggcggggctggcgcctcggcgtctcccgggagtgtcccgtccagccgccgagcaggtaggagctgctgggacccccgccctcagcccatccgcatccgcatccctagaggaaaggggtgtgcgagtgggggctggggcactggggagacaaccagagggagggcagcagcctgaagcggagagacagggatctggggacgcgagacaggtatggagaagacaaagagccgagggcggggagtggggcgcaggcggaggggagagggagagaccctggagacagaggccaggcgatagggaagagagacaggcgggttggggaggcagacacagggaagacgcctatgtggggtcaagaggcagcgtggagaccgaggcggtcacgagagcagcacggatgcgtggagagaccaacaggccaagaaggatgagggggctcagcacaggcaccgggcagcccccgacccgccctccagcaaaattggggagagggaagagggaacctgcgtctcagctcccaggaccaggtgcggagggagcagtcggctgtgggcgctcggaccacaggctgcccgctccccacctcgcgggacctcaggatcccagtcgggctattggggggttcccaggcaccggtgggccccggagcgagcctgccccgccgggactccgcgtctgtgcgtcagycccgcccgttgtcctggcaacaacccgwtgcccgggcaaccagctttgctctcaccccgcttgagaggagcccggctgttgctctgggcaacgcggtctgcyggttcccacgtctgccttcgcccgcttccggttcagaccctgcggaggggcgaggacgaggcagaagtcagcgggatgcctgtggggccgtggaggaagagggtatccctttaggatggaactaggtcctggacaccccctctcaagtgcggggaggctgatactacaactcccagcatgactcgcggtggctgtccggtttctgcgcggctgttcgcgcaaaggcctcatgggagttggagttctttgttgtgcgtggggctcaaaggacgtctggggtgggaatgggggactagggtgcttgagtgtctctgcagaaaagactcyaggaccccgccaccatgttcccggakcccccaaccccggggcctccatcgcccgacacgcctcccgactccagtcgcatcagccacggcccaggtgagcaagacccgggggtggggggccgagcagagagaaagcctggccaggattccgaggggcgggattcggacgggtgtactcgggcaggcgggctggaaaatccggctgggatcccgggtcgtcatcctggactggaatgcgaacgaaatggggtaaaaggaaggaacagatttgcaaaaaaaaaaaaaaaaaaaaaaaaaaaaaatcgaaaccggatcaaggggtgttgcatggaatgggatcttagaattggaaggtccacctagctcttcttttacagataaggaaacaggcccgatgaggagcagggcttcttgtaaaagcatcaggagttgagcagaaatggggggcggggtcgggtaaggaaaggcagaactaacaagcaagcaaatccagatggtgtcagcctgggttggggcatcgaatctctctataggccacattaggtggaagaaaaacacaggaagaaatgcaatgaaaatggctggagggaaaaggaggccagcattccagcttccacgtgtaatcaggactgaatcagcctgcgtgctgcccaggcctcaatgtgtgttgtctccacccctctgcagtgcccccctgggccctggccaccatcgtgctggtctcaggcctcctcatcttcagctgctgtttctgtctctaccggaagagctgtcggaggcggacaggcaagaagagccaggcccaagcccaggtccaccttcaggaagtgaaggggctgggccagagttacatagacaaggtgtggcccagcccagcccctccacctggccccttcccgcaccctgctcctctcaatggcccagctggtcccagtccctgctcccttctgtcctataggaacccaccttactggctcatcctccctgtgtgtctagccctcaactggactctggggacccagagatggaacagaactagttgctattcccaagaacttcccagtctggtgggagagtcaggcactgacacagacactcaccacacagggtaatatgtgccatactacagggtctcataggagcacagaaaaggcatcccactgtatagaaacctacagaaacatataaatatttggctctgggccgggtgcggtggctcacgcctgtaatcctagcacttgggaggctgaggtggacagattgcctgaggtcatgaattcaagactagcctgggcaacatgatgaaaccctgtctctactaaaaatacaaaagccagccatggtggtgtggtataatcccagctactcgagaggctgaggcactgaaaccgggaggtggaggctgcagtgagctgtgatcgcgccactgcactccagcctgggtgacagagcgagactctgtctccaataaatagataaataaataaatggctctgaaagctgaaaaccagctttgtgccagaatactttaaaatatgctgatttttttcagaaaatgggacatatttacagtaggaaaaagtttaaaacagagggtcagacagaggaggcttcgtggtggaggtgacttctgcactgagacctgagggacagagttaactgagaccagagagaaggacattctagtccaagttggagcatgtgttgaggccccatatccagattcaggccccatatccagattctgaggcttatttggggaacaaagagtcatttctcacaatagctgcactctggagtgaagtgtctggagaactcagcagtatccatgtcatgaaggtgatgaaggctacaaatatgttttgagcatgagagggacagggtcagatggtgttaggatgactcctctggaaccctgtgtaggacagatctgcggcgagggatccagggacgaggccagtgcagcagcagcctggagaggataaaagacatttgcattggatgaggccgttggaatggaaagtggtcactgcagggtctgaaaattaagtctctcagtgcagagtgcagtggttgcctgggagccagacagccctaggtttccaaccaagaaggaccatttcctggttgtgtgaccttggagmactcactgtccctctctgagcctcaagtctgtggtcactaacttggtatttcccctccttccttctcaataaggagctgttcaattagcatccgtaaaggatgctatttagggtcctggtgtccagccccatccctgtcccttaaaccagtgatgttcaaagaccgtctgcagcagaatcacactgggtacttgttgaaatgcaaattctggcactagcacctgacctatcaagtcagaatccctgaagaggtgacctcagacattttgccacaggattcaggggaattcaggttcacattgaattttaagaattgctggcctaggttaaggagacaccttctgctttttcattcaactttagaatggcaagtacacagtaaatatgccatttctcctccatgttttgctgtgctaagatcacaagtaaacatggcagtttggactagcaccccagtacatccattagcatgtgaaataaaacctgcattattcctgtgggcaatgggacactatcagcacttgttttaatctaagcatgacaagcacatgtctagttcctgcccatagcagacaccactaatcaaaccttcacaaacatactgcatctgtgttaccacgtctatttcctgcctgtggcagacagcactagtcaaatactgaatctgcttagcctgtgagagctcaggtatagcccaagggacctgtgagcctcccttggcttctgagcctgatggatactgctatcaggggaagacttcacccacccttacccctggctccytaaggtgcagccagaagtagaggagctggagccagcaccatccgggccagggcagcaggtgrcagacaarcatgagctaggacractgcagtactccctggattatgacttccagagtggccaggtgggtgtggaggaaggggawgctttggagggaggatcccgggggttccaaccccttctgaaaggagccatggaagggaggctaagactagtgttccccacctcccccactgtgcctgggccctgcagctgctggtgggcattctgcaagcaatgggattggcagccttggatcttggtggctcctcggacccctatgtgcgggtctacctgctgmcggacaaacggaggcggtacgagaccaaggtgcatcggcagacgctgaaccctcactttggggagaccttcgccttcaaggtgagctcctgccttcaggccccgtgttccatagcctgtgcccagtccctggaacactagggaccgaccccttccgcttttcctggaggcggccacagctcaggtggcagctaccagctctggggctattccactggaccctgggcactactgactcctgggctgtagcctggtccttgggcggtacgatttgggttccactgacccgtgatttttttccgcatggatccctggactttcccatttgagttcccccaactgttcgcttcgaccctcgctgcctcactccatgccttccttctggttgtgctgtgcctcaccctatctctgacttcctgctctctactgcggattctctgtgcactccaggtcccctacgtggagctggggggcagggtgctggtcatggcggtgtacgacttcgaccgcttctctcgcaatgacgccatcggggaggtgcgggtcm

SEQ ID NO: 94299 - DNA, 13653 bp, Homo sapiens
gaggccaaagcgggcagatcatttgaggacaggagtttgagaccagcctggccaatatggtgaaaccccgtttctactaaaagtacaaaaaaaaattacctggacgtagtggcaggagcctgtaatcccagctacttgggaggctgaggcaggagaatcgcttgaacccaggaggcagaggttacagtaagccaagatcaggccactgcactccagcctgggcgaccgagtgagactctgtctgaaaaagaaaaataaaaaaaaggtgaggcccagtggctcacggctgtaatcccaggactttcggaggccaaggcaggcagatcacttgaggtcaggagttcgagaccagcctgaccaacatggtgaacccgccctactaaagatacaaaaattagccagacatggtggcaggagcctgtaatcccagctactggggaggctgaggatgagaatcgcttgacccagggaggcggaggttgcagtgagctgagatcaagccactgcagtttagcctgggtgacagagtgagactctttctaagaaaataaataaatatgccaggtgcagtggttcatgcctgtaatcctggcactttgggaggctgagggggaggatcacttgaggtcaggagttggagaccagcctggacaacatggtagaaccccatctctagtagaaatacaaaaattagccgggcgcggtggtgtgtgcctgtaatctcagctactcgggaggctgaggcaggagaattgcttgaacctgggagatggaggttccagtgagccgagattgtgccactacactctagcctgagcgacactctgtctcaaaaaataaataaataagtaaataaataaataaatgtaaaataaaaataaaattaggctggacttgggggctcatgacggtaatcccagcactttcggaggttaggataaataaatatatatttttatattacatataataatatataaaatataaatatatatatattttaaaacagggtctcactctgtcaccctggctggaatgcagtggcactatcacggctcacagtagctttgacctcctgggctcaagagattctcccacctccagcctcctgaatagctgggactacacacacccaccatcatgtccagataattttagtattttttgtagagatggggtttcaccatattgcccaggctggtctcaaactcctgggctcaagtgacctgcccagctcagcctcccaaagtgctgggattacaggcatgagccaccgcacctggcccacatcaggactatattgaatagtgcaggtacagaacaggtgcatccttgcatataaagttctgttggatgggccgggcacgatgtctcacacctgtaatcccagcactttgggaggccaaggcaggcggatcataaggtcaggagtttgagaccatcctggccaacatagcgaaaccccgtctctactaaaaatacaaaaattagctgggcatggtggcatgtgcctgtaatcccagctacttaggagactgaggcaggagaatcgcttgaaccagggagtcagaggttgcagtgagccgagattgcgccacagcactccagcctggcaacagagcaagactccgtctcaaaaaaaaaaaaaaaaaaagttctgttggatggtgctgatgtgtaaaatggcctcaatgaagaggcttggatctgcagagaggttgggggacatcactgaggaaatggaaacggaagtcaggggacaggcctggaaatgtgactaaattctaaggcatgaattggataattcgcaacttcggaaaaagagatttcaggtgcccatttatttatttatttatttatttatttatttattgagatggagtttcactcctgtcgcccaggctggagtgcagtggcgcgatctcggctcaccgcaacctccacctcccaggttcaagcgattctcctgcctcagcctcccgagtagctgggattacaggcatgcgccatcacacccagctaacttttttgtatttttagtagagatgaggtttctccatgttggtcaggctggtctcgaactcccgatctcaggtgatccccctgcctcagcctcccagagtgctgggattacaggcatgagcaaccatgcccgacctattattattggtttcttttttatttttattattttattattattggcttcaggtgcctattaacccccaaaagaaggtggggttttttggccctatgcagcggatcacatctgtaatcccagcacttttggaggccgtggtgggaggatggcttgaggccaggagtttgagaccagcatgggcaatatggggagacctcatctttagaaaaaaaaaaaaaaaaaaaaaaaatatatatatatatatatatacacacacacacatacagacacacacacatatatacatatatataaaaatatatggccgggcgtggtggctcacactgcaatcccagcaccttgggaggccgaggcaggtgaatcactaggtcaggagttcgagaccagcctggccaagatggtgaaaccctgtctctactaaaaatataaaaattagccgggcacggtggcagacgcctgtaatcccagctacctgggaggctgaggcaggagaatcgcttgaacccaggaggcagaggttgcagtgagccaagatagggccactgcactccagcctgggcgacagagcaggactctgtctcaaaaaaaaaaaagaattatttaggctggggatggtgtctcactcctataatcctagcactttgggaggctgaggcgggtggatcacctgtggtcaggagttcaagaccagcctggccaacatggtggaaccccgtctctactaaaaatacaaaaattagctgggcacggtggcaggtgcctgtaatcccagctactcgggaggctgaggcaggagaatcacttgaacccagcaagtggaggttgcagtgagcaaagatcacgccattacactccagcctgggcaacaagagcaaaactccatctcaaaaaaaaagaaaagagaaagagaataataaataaaaaattagccgggcatggtggtgcatacctgtggtcccagctactccggggactgaggtgggaggactgcttgggcccaggaggtcaaggctgtagtaagctgtgatgataccaaggcactccagtctggggtatagagggagaccctgtttcaaaaaaataatacacaaagaatgcctttttacatttttttctttccagagaaggggttctacctgttaacccaggctggactggaactcctggactcaaatgatcctcctgcatagctgggatcacacgcgctgggcacactatgccagatgcaaagaatacatttatttctttttttttttaattgaagttcagctttttattgaacactttataaaaagaggttcagtgaaaaagaccaaagcgcatgtcatcatcagcgtcctcggattcttctttctttgcttccactttcttctcctcagctggagcagctccaccagcctctacactgcagatgaggctcccgatgttgacattgaccaggcctttgcaaacaagccaggtcaaaaaggttcaacatttacaccagctgctttaatgagagcattgatcttatcctccgtgacggtcacctcatcgtcgtgcagaatgagcgcctagtagatgcaggcgagctcggagacagaggccatggcgcgggcgagtgtggggctggcactgccggacgtggtgctagtcgcgggatgaagtgagggcctcactgcaacgcggccttagcttcctcggaaggaccgagcaccttggcagcagctgaggaaagggaagaatacatttcaatgagcttgatgtcagaattttcttttactttttctttttctttttttttttgttgttgttagagtctcactctgtcgcccaggccggagggcagtaagtagtgcgatctctgctcactgcatcctccacctgccgggtccaagcgattctcctgcctcagcctcccgaggacctgggattacaggcgtctgccaccacgcctagctaactttttcgtatttttagtagagacagggtttcaccatgttggccacagtggtttcgaactcctgacctcaagcgatctgccggcctgggcctcccaaagtgctaggattataggcatgagccacagcgcctggccaagaaatttgttttttttttgagacagagtctcgctctgtcacccaggctggagtgcagtggcacgacctcggctcactgcaaccaccatcttccaggttcaagcaattctcccgcctcagcctcccaagcagccgggattatagtgtaatacccaacctggtttttactaaccctgtttttagactctccctttcctttaatcacctagccttgtttccacctgaactgactctccctaagctaagaaagccagacagattccatcttggctctttcactggcagtcccttcctcaaggacttaacttgtgcaagctgacttccagcacatccaagaatgcaattaactgataagatactgtggcaagctatatctgcagtccccaagaattcgtctgattgataacgcccaaagccccgcgtctatcaccttgtaatagtcttaaagcccctgcacctggaactgttttactttcctgtaaccacttatccttttaactttttgattacttaacttctgtaaaattgttttaactagacgccccccccttcctaaaccaaggtataaaagttaatcaagccccttcctccgggctgagagaattttaagccttagccgtctctcaggcgctggctaataaaggactcttaattcgtctcaaagtgtggcgtttttctaactcgctcaggtacaacaataggcacttgccaccatgcccggctaatttttgtatctttagtagagacggggttttggccaggctggtctcaaactcctgacctcaggtgatctgcccacctcggcctcccaaagagctgggatgacaggcatgtgccactgcgcccagccaagacattttttttgctgctgtttttactgacagagaggagtgatagctcagtcagtcattaaaaggagaattcctcctctaatcaatgtggaggccctaaggggaaggggtggggcatagtctcattttctccatctgttgaggatttactggaacagaactggttttcagtttacagagtcctcttttactgaatattcctaaagacctttgagaagaacttagtttaacaagtatttgttaaaatctactaacttccagagcctaattcattggtgagaaatagagattgaattccttaatacctgggctgtgcacacattggctgtcgcctgtaatcccagcactttgggaggccgaggtaggaggatcacctgaggttaggagttcaagaccagcctggccaacatggtgaaacccgcgtctctaccaaaaatacaaaaattagccgggcatggtggcgggtgtctgtaatcccagctactcaggaggctgaggcaggagaatcgctggaacccaggaggcagaggctgcagtgagctgagattgtgccactgctctccagcctggatgacagagtaagactgtgtcaataataataataataataataataaaattttaaaaaagttctctactaccgggagtctgtatttaagtggacagaactggaggcagctgaggactagggcaggtgggtggaggggcgaggcctccagttgggaagcaatgaaaagcatcctaaagaaagtgctgggaagagaaacttttttctctttcaacttggctgctatagttggtggtctgcaaattaactgaaaatagagagatctacagctgaaaaggtttatttacagatgcttgaaggagttcccaattatgtaaacctcaaggaacagcctggagaaaaggtttacatatatcaacttaacaaacaagggcgttttttggacctctatgggaaaatagaagcctggatggaacaatccaaagttttaatcaaagaaggtggtgtttagttgctgctcaggatagttgatacctcaggatttggagatgcagtggatagtagtaattgctggcagcctgttatcgattacattgatagtraatttgaggactacctaaatgcagaatcgcgagtgagcagacgtcagatgcctgataacaggaccattacataactgaagactcccaccttcaggcaggattgggtagtgcatgtttgtaactacttgacattgccttttgttgagacttaaaccactggatgttgagtttatgaaacatttgcatgaaaaagtgaatatcatcccacttactgccaaagcagacacactcacaccagaggaatgtcaacagtttacaaaacagataatgaaagaaatccaagaacataaaattaaaatatatgaatttccagaaacagatgatgaagaagaaaagaaacgtgttaaaaagataaaggaccgtttacctcttgctgtggtgggtagtgatattatcactgaagttaatggaaaaagggtcagaggaaggcagtatccttggggtatatattgtgctgtgatttagctccagcagtgccatgtgcaactgaaaaagaatttgggagcacggcacaaagaattagaggagaaacgtcgtcagtttgaggatgagaaagcaaactgggaagctcaacaacgtattttagagcaacagaactctttgagaaccttggaaaagaacaacaagaaagggaagatcttttaaactctctattgaccaccagttgtgtattagttgccaatatgccagcttggacatcagtgtttgttggattcatttgaccaatttgcaccagtttgatccataatgatggatttaacaacatgacaaaaattatttttgttgttgttgttcttgatggagattaagatgcctcgaattgtctagggtgttgtgtacttagaaagtaacagctctaagtacctttcctacattttctttttctttttttattaaacaggtctcttcagtttaatgcaagagaacattttactgttgtacaatcatgttctggtggtttgatagtttacaggagattccaaaataaaaggactctggaaggttttcattgacgatgaattgccataatatgatgcaaactgtgcttctctatgataattataatacaaaggttccattcaatgcagcatatacaataatgtaatttagtctaacacagttgaccctatttttgacacttccattgtttaaaaaaaaacacatgaaaaaaaaaccctatatgcttacagtgcacctagagctttttataataacctctttttgtttgtttgttttggattctttaaatatatattattctcatttagtgccctctttagccagaatctcattacagcttcatttttgtaataatatttaatttagatattttccaaatattgaccctgctaaaatagaatatagcatcttccatatggtaggaaccaacaaggaaactttgctttaactccctttttacgatttayggtaggtagcaggggggaaaaatgcatttatagatcatttctaggcaaaattgtgaatctcacaaccaacctgtatgcggtctctttattttactagaaatgggaatcatggcctcttgaagagaaaaaagtcaccattctgcatttagctgtattcacatattgcatttctgtattttttgtttgtatagtaaaaaaatcacgtaataaaccatgccgtgatgtataaaaaaaaaaaaaaaaaaaaaagtattttcagcttcaactccacacaattcaatggaaatgtcccctgacctgaagttctggtttccctgcattccagacaggacattttcttttgtccttatctcagtaaggactgagtactgtgagaggaacgagtgagtctcttttgtttctgattgcccagagcctgtatcttgcttggcacataggagatagcaaaagtagacatctatgtaaattcttgaattgacactcccttggttcacaaaaattggctgttatcagtgtggcttcgacttacttgattctttttgtttttctgttttttgttttttgagacagagttttgctcttgctgcccaggccggagtgcagcggtgtgatcccggctcactgtagcctctgcctcccgggttcaagccgttctcctgcctcagcctcccgagtagctgggaatacagccgtgtgccgccatacagggcgaagtttttgtatttttagtagaggcggggtttcaccatgttggccaggatggtcttgatctcctgaccccgtgatccgccctcctcggcctcccagagtgctgggattacaggcgtgagccaccgcgcccggcctatttatttaattttttgagacggagtttcgctcttgttgcccaggctggagtacagtggtgcgatctcggctcactgcaacctcagcctcccgggttcaagcaattttccaccctcagcctccggagtagctgggattatagcacgtgccaccgcgcccaagtaatttttgtatttgctagtacagacggggtttcgccatgttggccaggctggtcttgaactcctgacctcaggtgatccccctgcctgggcctcccagagtgctgggattacaggcgtgagccactgcacctgtccctaaccagcatcttatgtgctggctgtacatccacactggcctctctgggtaccttctggtgtattctttttcttttcctttctttttgagacagggtcttgctctgtcaaccaggctggagtgcaatggcgcgatcttggctcactgcaacctccgcctcccgggttcaagcaattatcctccctcagtctcccaagtagctgggattacaggtgtctgccaccacacctggctaatttgtatatttttagtagagacggggtttcaccatgttggtcatgctggtcctgaactctggacctcaagtgatccacctgccttggcctcccaaagtgctgggattacaggcaggagccaccgtgctgggcctacggtgttgttttttgagacagggtctcactttgttgcccagactggagtgctgtggtgcagtcatagctgattgcagccttcaactcctgggcacaagcgatcctcccacctcagcctcccaaagtgctgggtttaccggcctgagccaccgtgcctggctgaagcctaaagacttctctggggcagggcatgatggctaccacctgtaatcccagcagtttaagaggctgaggtgggaggattgcttgagcccaggagttgaagactgcagtgaactatgattgcgccactgcactccagcctggagagcataggaaaaccctgtaactagccgggcatggtggctcatgcctgtggttccagctactcgggaggctgaggtatgagaattgcttgaacccgggaggcagaggtcgcagtgagctgagatggcgccactgcactccagcttgggtgacaaagccagacgctgtctcaaacaacaacaaccacaacaaaacaaaaaagagaatgatggccgggcgcggtggctcacgcctgtaatcaatcccagcactttgggaggctgaggcgggcggatcaccggagatcaggagttcaagaccagcctggccagcatggcaaaaccccatctctactaaaaatacaaaaaatcagccgagcgtggtggtgggcgcctgtaatcccagctacttgggaggctgaggcaggagaatcacttgaacccgggaggcagaggttgcagtgagccaagattgcgccatcgcactctagcctgggcaacaagagctaaactccacctcaaaaaaaaaaaaggaatgataagttgtggggatgtgacaagacaaagaggcttgggctaggggaagtgaccaggaaacagtggggaacttaaggaagataagggttagtagctgagttgtttagcatatggactcctggcccctgctgataggaacattcttctcttcctggcgcaggaagggcgttttcctcttgataaattttacaatctacttttacgtaggaagggggaggtcagatgcatctgctttttcccacaggcttccaggtcgaaataatccatatgctgacgcgatgactttggggtgacatgccctgagccccttcaatatatactagccccttgctgactgagagttgagagagcaccattctctgcctggaatgtttgttgctagctaatccatcccgccgactgtggcctcccaaactgctggcgttacaaccagcactttgggaagccaggccaggaggatcatttgagcccaggagttcaagaccagcgtgggcaacatagcgagacccccatctctacaaagagtacaaaaattagccaggcatagtggcacgcgcgcctgtaatctcagctacttgggaggttgaggtggaaggatcacttgaggcagacgttgcagtgagccaagcactccagcctgggtgacagagccagatcctgtctcaaaataagaaagtttcgggttccattcggttctcccaccgaccccgctgtgggtctcagcagctcgggcggcgggaggagccgcagccgccaggcagcccagcttcgccaaggctctcggcagccgcggcccgcagacagccggcacgcgccctctccgccaccaggatgcccaagaggcaggttagctccgccataggggccgccaaggaagagcccacgaggagatcgcacggttgtcagctaaacctgctcctgcaaaagtggaagcaaggccgggtgcggtggctcacgcttgtaatcacaacactttgggaggctgaggcgggcggatcacctgaggtcaggagttcgagaccagcctggccaacatggtgaaacccccgtctctactaaaaatacaaaaataagccgggcatggcggtgcgcgcctataagcccagctactcgggaggctgaggcaagagaatcgcttgaaccggaaggcagaagttgctgtgagccgagatcacgccattgcactccagcctgagcaacagggtgaaactacgtctcaaacaaaacaaaacaaaacaaaacaaaaaaaccagtggaaatgaagccgaaaaaggcagcaacgaaggatacatcttcagacaaaaaagtgtgaacagaagggcaaaggggagcaaagggaaaacgggcagaagtggctaaccaagaaactaaagatttatctgcagaaaatggggaaaggaaaactgaggaggcccagcctctgatgcccagtctgattcaccgtataccacgtctcatcagtgctccctgtctcgcttcttgtaaaacccagaggaatctttttatcaactattttgtaaatgcaagttttttagtagttccagaaactttttttttttttttttgaaacagagtcttgttcttgtcgcccaggctggagggcagtggcgtgatttcagttcactgcaatctccacctcccgggttcaagcgattctcatgcctcagcatccggagtagctgggattacaggcgcgcaccaccatgcctggctaattttcatatttttagtagggatggggtttcaccatgtgggccaggctggtcttgaactcctgacctcaggtgatctgcccacttcggcctcccagagtgctgggattacaggcgtgagccactgcacccggccagggttcgtgtttatatcctataatacaaagcatattaaatggcagcatggaatcagctctgcatttagtgtcttgaacattttaaattacttctattctcctgtcgtattttggaattgtttcctaaagaaaaccactccctgaccatggctctccctgttagaattgtgtggactctgtaacatctttgattgtggtagttctgttctcctaataagtttgtttctgcgttgtgaaagatgaaaaatttgaatatgtagggtacatgctatttttagttgtgaattggagggacgtccgtaacagctgatcaacatgtgaagatactggtacttgatagcctcttaaggaaaatgtgcttccaaattttaagctggaaagtcgccggaataactttgtagaagaattacaatacatggccgggtgcggtggctcacgcctgtaatctcagcactttaagaggccgaggcgggcagatcacctgaggtcgggaattcgagaccagcctgaccgacaggcagaagccctgtctctacttaaaaaaaaaaaaatacaaaaattagccgggcatggtggcatttgcctgtaatcccagctacttgggaggctgaggcaggagaattgcttgaacccgggaggcggaggttgcggtgagccgagattgcgtcattgcgctccagcctgggtgacaagagcgaaactctgtctcaaaaaaacaaaacaaaacaaaacgatttacaatacatggctttttagattttcggtacgtatgttaagaattgtgtacaaattgaaatgtctgtaccgatcttcaaccaataaaatctcaattatgaaagaaaaaagtaataacgttccatctattgtatcctcacgtgaagaataattcccacacttaagtgcttgctttggcagcacacattaaacaatgaaatgataggttcccacggcccctgcgcaaaggtgacagccaaattcatgatgggttccgtatttaaaattaggggaaaaaaatttctcacacttaaacaacaaatcacttcttgttcgagtagattctagatatgctgttaatctgaaatacaaatttaaccgggtttccctgctctgggaagccccctttggcaattcagataagggtctttttttggaaggcaataggtaggaatacggagatgtcagcaaagggaaggggctctcagggatttctatggattgtgcagatgtcctgccaggtcccaaatttccccaaaagatcctgagtccaggcagaaaggaccactgggctccagaaaccaaatgaagtggcccagagtgggagcctttgtcatcagattccatgactgaaagacagccaggagcagagcaaaaatcccagggactctctctaccagaagacacctgctccatccagatcaaacccaaactgtcaccagagaatgatgcctggcactcctttcccctcggctcatcctgcctgcaccagtgcaatgccctggtgttcccagtccagatgccttcactccatccagtgccccaggagggtcaccttgcagttatcagagaggaagatgggttcttccacccttgtgagcttcccagacatcagggtctgcccaccccactccattccgaaaggatgttctgcccagttctcccagcctcctgcttccatccagggaccatccttcattggcaagattcacacttcagacaaccagaaccaacccattatattaaaagtggtcacaacaggccacccattcaagactggtttttgtgaaatgcccacaagaggcaaatccagagctagagagatgtagagtagttgccagggtc

SEQ ID NO: 94300 - DNA, 48449 bp, Homo sapiens
ccaagattgagccactgcactccagcctggatgacagagcaagactccatctcaaaaaacaaacaaacaaaaaaaacccaaaaacattcttgataagatagtctggaacaaaagctttaaaaaatgtgaagatatgtgagatgccctgggagaattatctaccaacatagtgtacatttccctttaatacacgggaatagtcaatcttctgaacaaaaagatcccctggctgggcacggtggctcatgcctgtcatctcagcactttgggaggctgagacaggcagattgcttgagtccgggagtttgagaccatcctgggtagggtagagagaactactcaggctgagtgagcttctagacaggacaaataaaaagagcattgcaagtagggttttacaggggggtcacttgacaaggcaaataatgacaatttcctgggactgggactttgaagggactccagccctgttctcctcctgccaatggttgccaggttgctgttcctctctgacggagactgctggctttcaagtctaccgtggatcagtggagggacaatgaaatagggcaagttaaaaaaaaacccacaaagcttgctattcttcccaagattcagctgttttccttgaaagcgatgaatatcatccctagattgctgcaaactcttagttaatttccaaagattaaaaaaaaaaaactgtaaccccagcattttggaaggccgaggcaagcggatcacgaagtcaagagatcgaaaccatcctggccaacatggtgaaaccccgtctctactaaaaatacaaaaattagctgggcatggtggcacgtgcctgtagtcacagctactcgggaggctgaggcaggagaatcacttgaacccaggaggtggagactgcagtgagctgagattgcaccactgcactccagcctggacgacagagtgagactccatctcaaaaaaaaaaaaaaaaaaatgatgctgaaattgcttttttttttgagatggagttttgctcttgtcaccgaggctggagtgcaatggtgccatcttggctcactgcaacctccgcctcccagattgaactgattttcctgtctcaacctctccaacagctgtattttcagtagtaaggccttgggaaggtcattaggtcatgatggtggagccctcatgaatgggattagtgtccttataagaattctgtcagacacagtggctcacacctgtaagcccatgactttgggagatcaaggagggaggatcagttggggccaggagtttgagaccctgtctccacaaaaaagtaaaagtaaataattagctaggcatggcggcgaatgcctgtagtcccagctactcaggaggctgaggtgggaggattgcttgagcccaggagtttgaggccgcagtgagctgtggtcatgccactgcactccagcctgggtgacatagtgagaccctatggcaggatctcaccattttttcctccaaaaaaaaaaaattgttaaaaaaaattccagtattgtgcagtagctggatgtttcaaattttaaaaagaagaaaataaaaaataaaataagagtcttgatagaacttgcttctcccttccaccatgtgagaaggacacagctagatggcaccatctacgaatcagaaagtggaccctcaccagacgctaaattgctggtgccttgatctcagacttcctggcctcccaaactgtgagaaataagtttctgttgtttataagctacccagtttatggtattttgttacagcagcctgaactaagacacgttgcaacttccactttccattcaacatatatcgtccccatttctcttactccatacatacagatctaagtggtttttatgaaagttctttaataatccatagttggtatgtccgatattttatgcaataatctatcaaatagtggactttcctattttacatatgtagaaactgaggatcagggccgggcacagtggctcacacctgtaatcccagcactttgggaggccaaggcggatcacttgagcccaggagttcgagaccagcctaggcaacatagtgagacccccgtctgtacatttttaaaattaaaaaaaaaaaaggccaggtgtgatggctcacgcctgtaatcccagcactttgggaggccaaggcgcacggatcacctgaggtcaggagtttgagaccagcctgaccaacatggagaaaccccatgtctactgataatacaaaaattagctgggcatggtggcgcatgcctgtaatcacagctactggggaagttgaggcacgagaatcgcttgaacctgggaggcagaggttgcggtgagctgagatcgcgccattgcactccagcctgggcaacaagagtgaagctccatctcaaaaaaaaaaaaggaaactgaggattaggaaagcccaagacccaacatcaggaatgtctcctagtcccagaatctcttgcatttgtacaccccaccccactatgaactcaggcatagtaaaataatccaaaatcccccatcaaatattttatatatatacatatatatgtgtgtgtatatatatatatatacacatatatatgtgtgtgtgtgtgtatgtatatatatatatatatatatatatatatatatatatatatatacatacacatatatatgtatttctattttattttaattttttttgagacagggtcttggctgttgcccaggctagagtgtagtggtgtgatcatggctcactgcagcctcgatctcttgggctcaagtgatcctcttgcctctgcctcctgagtactacagggatatacctgatgtactacaggcatgtgccaccactcccggctaaactttctttcttttttgcagtgacaggggtcttgctatgttacccaggctggtctttacctcctggcttcaagcaatccttcctccttggactctcaaagtgttcagattacaagcatgagccaccaccacacctggattgtatcattatattaaagctgagttttagtcaagcaagcctttggagtcagactgcccaggttcaaattccagcacccgatgagtggggtggctcctgtttgtaaccccagcactttgggaagccaaggcaggtggatcatttgaacccaggagtttgagacgagcctgggcaacacagtgagaccccaggggtctctacaaaaattaaaaaattacccgggcatggtcacacatgcctttagtcttagctaccgggcattgggggggccgaggtgagaggaccacttgagcctgggagatcaagactgcactgagcacagaacagattgcgtccctacactcccagcctaggcaacaaggcaagaccctgtctcaaacaaacaaacaaattccagcaccactattaccatctatgagaacttggacaaattcctaaagttctctatgcctcggtttcctcatccattaaattaggatgatgctgctactttacatatatcatagagttattgtcagggttaaatgaattaatttactgaatacactttactgtagctattatcactggcattgatctgtataggtattgatttgtataggtattgatctgtataggtattgatctgtataggtattgatctgtataggtattgatttgtataggtatttgttaaatacttattaaagtttgcagttttgttttgcattttggaatccataatttgtttttattttgtttctgagatttataatgcctcatttaagcctctgaaaattcctaggccctaagcacttcaaaggccaccagcccaacatcccaagcagcctgacaccaagacaggcacgcatagctaaaaagatccctagcctcagagaccttggggctgagaggagtcctgggaatagggagggctgggactgaaatattcaaccccatccccacttttatgagcagcagtttcctaactgcagtgggtaagggtatttgaaatagatgctgggccgggcacggtggctcacacctgtaatcccagcgctctgggaagtccaagtgggcggatcacctgaggtcaggagttcgagaccaaagacagccaacacggtgaaaccccgtctctactaaaaatacaaaattagccgggcgtggtggctcatgcctgtaaattccagctactccggaggctgaggcagaagaatcgcttgaacccgagaggtggaggttgcagtgagcagagattgagccactgcacttcagccggggcaacaagagcgaaactccgcctcaaaaaaaaggccgggtgcggtggctcacacctgtaatcccagcactttgggaagccaaggcaggcagatcaccctgaggtcaggagtttgagaccagcctggcccaaagtggtgaaaccccgtctctactaaaaatacaaaaattaaccgggcgttgtggtaggcgcctgtaatcccaggtactctggaggctgagacaggataattgtttgaacccaggagacagaggctgtagtatgccgagatcgggcccctgcattctagcctgggcaacagagcgagactccgtctcaaaaaaaaaaaaagaaaaagaaaaagaagaaaaaagaaatagatgctgtgggtattcagatctgtcagagtgctagctcagcctagcccttcaagtagcagaataaaggaggaaagagcatcccaggccttcccatccccattcaactccctcagttagagtggtcctaagattgcggtgggggggtagggctgtgttgaagaggttaaaaacagagattagtcagatccaatcctgctcccactctatggaggaaacaaattcgaatacatagtcacagcccaggctctgggattgagagacagagagagagattggattggagagagagagagagagagatgggattggagagacagagagatagatgggactggagagacagagagaggggttctgtggctctggaagcctagagaacagagcctgaagacagagaggaaagggagtaaaggggaggcatttatgcagagatctcagaagtgaatatgaaaggcacccctagcagaacgcacagcttgggcaaggaggcttgctggcatgaaaacgcaagaagtgctcaggcagctgtaattctccaggacatcagataaaaggtaaaaaacagatgggagacgcgcctagacagggtattgaataccagcccgaggggcttgggtttcatccaaacagcaaggcaactgagctcaacacagtgagactcggtctccacaaacatttttttaaaaattggccgggcctagcggcgcgcgccgatagtcccagctatttctgcaggctgaggcgagaggatcatttgagctcggggaggtccaggcggcagtgagccaagatcctgccactgcactacagtctgggcaacagagcgagaccctgtctttaaaaaagtaaaaaaaaaaaaaaaaaaaaaagaaagaaaaagaaaaaagagagaagggcaagtcgctcccttctctgggccttggcataaatcaagcacaaatcaaagtctcactccctcctcctgccgcgcaacggcgcggagagccagccagccagccagcggaaccacggcctggtaacccaaaacctgcacaccctccagctccccacaggacgtcacgtattaccaccgacgcacgcgcagaagccttcccggggactcaagaaagggcaggcttagcctcctccccatgtcgcccctcattggctagaaactactgctcgtctcggtcgttgttagcagcgaccagggcgggtacaatcttggtcgctaggacacggctaacttccgctttcttccccctctcctaggctcaaactagtcaaatcttgttcactcgaccaatggcaaatcggaagtgggcgggacttcacaagtccggaccaaagaaacgcgagcttagccctgggtagcgcggccaatggccgtggagcagcccctgtaaactggctcgggcgcccccacgcccgcccttccttctyctcccagcattgccccccccrcgtttcagcacagcgctggccgcagtctgacaggaaagggacggagccaagatggcggcggccgacggcgacgactcgctgtaccccatcgcggtgctcatagacgaactccgcaatgaggacgttcaggtccggaggctacgggggacttggggaagacgcggaggggtacctgggggcacgggcggccctcgcggagaagactcagcgttcgctgggagtggcggaagggggcgacggcyaatcagcgtgcgtctcttatctccccggttgcccggactccttgagacggcgctcccgattgggtgtcggcccagtggagggcgggggccagcgctagcctcgagggtcccgggcctgccctgtgcgcgcggcggtccgcggtcctgggaggttgtgsccagggctggggtctgcggactgggtctgggagagaggaggactccgtgattggcggcggcctctgaatggcctcttggggatgtggggcgcgcatgacttgctccaagtaggggagggccgccgggtgggtcgggacctgggaaggtttttttgttttctgggtttcgactgctgggccaagtggggaccgagaggcgaaggcctgccatcctaattcctgctcttcctccgcctctcattttggtttaggtgtcctaagaggacggggacgcaaaaacacccccccaccaaaggtggggactagccaagtttaggagcgaattaggttgtagaaacccgcctccccatctccccggatcctcccattgaccaggataggggttgagggatttgctaagcagatgaacatttatttatttcttttttttgagacagtctctgtgtcgcccaggctggggctggggagcagtggcgcgatctcggctcagtgcaacctctgcataccgggttcaaaccatcctcgcccctcagctccctaattagctgcgattaccggcgcgagccaccacgcccgactaatttttgtatttttagcagagacggggtttcaccatgttggccaggcttggtcgggaactcttgacctcaagcgatccacccgcctcggcctcccaaagtgttggaattacaggcgtgagccaccgcgcccagcccggatgaacattcctggttatgggatgaggtgacccaaggctctgagccgggctggtgtgggattgagaacagttagaactgcaagtccacctcccacctgctgtgtgaccttgtgcaaattacttcaccgctttgggtctctgtgttccataaaatatgggctaattgtagtcctggtcttgctggagggacttgtgagggactgaacgaattatgacacaaataaaaagtagaatggtgtcaggcctgttgtaagggctcgataaatattagctgtaattattgggagtggtgattaaagaggtcccatcctccctttaggtctgttttcccatttataaaattggacaaggtgcactgggtaacctgccaaacgtgggtctcgcctcctaggttcctggtatatcactgtttctggtggcatacaggttgtggttgtattcccggcccttccacttgttactgattgacaagggcaagttagttaatctctctaggcctgtttcctcttctctttaatggggttaattacctagttcatagggcggttgtatgaattcttttgttcagtaaatatatgccatgtatgagatatgatgctggggatatagtggagacaccagttgctatacaggatccagatgtgaaacaggtcagcagagctgaatagatgagtgtttgaaaagtgatgggaaggaaacaaataggatgtagtggtagcgaatccatattgaattgggcctctattctgtgcagggcgctgttctaagcactggtatatagcaggaacaagacagaaaaaactctaggccttggggagtttattttgtagtgaggagagacagacaataaacagagtatactggggataagcattagggagacaaataaaaataagagagatggggtatatatagggcatgcagttttaaagtgtggtcaggggaggccttgttgagatcctgtttgagaacacgcctgaaagcagagggcacagcaagtacaaagtggggtggggcagatccattttaagaaggccaatcaggcaaggcccctctgaggatgcagagtttgagaagagattgaaagaaggtgggggagagcctcccaggaagagggaacagatatgtaatggcctttttttttttttcttctttttttgagacggagtcttgttgctctgtttcccaggctggagtgcactgacgcgatctttgctcactgcaacctccacctcccgggttcaagcaattctcctgcctcagcctcttgagtagctgggactacagacgcaggccaccacgcctggctgatttttgtgtgtgtgtttttagaagagactgggtttcccggtgttggccaggctggtctcagactcctgatctcaggtgatcctcctgcctcggcctccgaaagtgctggaattacaggcgtgagccactatgcccggccagttttttgttttttttaactccaggatcacttccttcagctatctatcctcccatcttttcattcatccatccatccactaaccagcagacatttgtagggagatgtctttgtgccaggatcagagctaggcagcttaccggtttattctaaagaatattgcaaaggatacagatgaagacacatgcagggtgaggtgtgggggaagttgtgtggagcttccatgccctccctaggcattccaccccccaggaaccgcgaggtgttcatctgtctggaagctcctatggctgcttttgtgctacagcccagagttgcatggttgtaacagagatggccgcaaagcttcaaatatttgctgtctaaccctttgcagggaaaaaattgctgacctctgacttaaaccatctgcgtaacaaattattgggtgcttgctctatgttaggtacagtacagaggaatatcactgacgatcttactgaattctcacaatcactctttgaagtagrtcctgtccttgtccacattttccagatgaggaaactgaagcaccataaataacatggccaaagctgtgcagctgagaaatgaaggagccaggaaaggaagtaggacctaagggtggaatagaatctggggtgggacacacggttgctgattatattcatatgccagacattttaattgtgtctgagacagttcaggatactagaaggaacatgggacatgaaatcctgtagtcttgatttatttgttcagcaaatatttatcagcacctcctgtgtgccagactctgttttagatactagacatacagtagggaacaaaacagcaaagctgcccttgtggggtttacattctggtttgggagacagatagtagatctgtagtgggatgtcagtggcagtaattgctaagaagaaaaattgctggacgtggtggctcaagcctaattgtaacactttggttttattttattttattttttttgagacagagtctcactctgtcgtccaggccgtctctgctcattgcaacctccgcctcccgggttcaagtgattctcctgcctcagcctcctgagtggctaggattagaggcgcccaccaccacatccagctaatttttgtatttttagtagagagtgggtttcaccatgttgrccaggctggtctcaaactccctgcccgcctctgcctcccaaagtgctgggattacaggcatgagccaccacccctggccaattctagcactttggaaggccaaggtgaaaggatcgcttgagcccaggagtttaagaccagcctgggcaacaaagtgagaccctgtctctaccaaaaaaaaaaaaaaaattagctggtgtgatgacacaggccttggtcccagctgctcaggagactgaggtcggaggattgcttgaaccagggagatcgaggctgcggtgagagcctgggcgacagcaagaccctgtctccaaaaaaaaaaaaaaaaaaaaaaaagaacaaaataagacaggtacagggaatagagcaagcacctggggctgctttgttagatagggaggttagagaaagctgctctgaggaagtgatgttgaacaaggatttgaatgaaatgaacaggtcgtggaagagcagtctgggcagagggaatagttggtacaaaggccaggagtgggaggatgcttgatgcgttcaaagcacagcaaaaaggccagtgtgactgaggcagagagaatggcaaagtggtgggaggtgaggactagaccaggactagatcaagtgaggcctgtgggccaaggtgaaggccttgaagatgggagggaggaggaggaattgcaaggctttcagtagtaattatgggttctggtataattttaaaggatccttcctctggctgtcataggggttgggccctgttgaggtgccattacaaagcacccaggaccagtgttagcatgcaggggggaagtatggttacagtcaggacatgttgaggggggctgatgggatttgctggtgggtaatgtagagggaagagttgagggtgactgaagtttgaacccccgctctgccagttgtgctctctgtgtgcccctggagcagtactttcccctctttggacccagattcctcatctgcaaaatggggataatgatgaagaatcagcgtgtgcctggttgtgaagatgcagtgaaattggcttgctcattgttctgcggtagtcatatggtggggattgagcagacctgaggaaatggggcatctggggaaccgtgtgggaccaagtcagcaagtgctaaagcctgggttgggaatacactgggctgtttgtttttttggttactatcaaggaagcagttgtgacaagccaggcccagtgagaatggatcagtagactagggtcagattgtgttgggccttgtaggccagagtaaggccttagcttttattctgaatgtgcagggaaaacatactacatgtgggattataccatatacattcatattatggaaggctccatgggttgaatgcagggtggatcttcaaaagtgggtcccctttccacaggtgcatatagtgggaaggcggattttatttattaactcaccacagagcaggctctgtgccgaggcctgctgggacacagagagtcccagtctagggtggtaagtgctgtcatggaaccatatgggtggactctttggaaaatcccaattcctattctctcacttaacacaacaatcaacaacacagaagaagacttccgtgactaaatgtgtgttggggtggggagggattcttcaccaccactaagcaagcattcagttctgcagcacacgccaactggatgtcctccaattcagttcagacacgacctggagacagtgttggatccaacaggttgagggctcaggcctcaaaactgccccttggccctcgccttcagttgccattctgggtcgtcagaacttctgatctacctgcttcaagttggagttcccatgaccaccctgcctttgggtttgattaatatgctagagcagctctcagaactcagggaaacatgtaagtttatcagttcattataaaggatagtataaagaatacagatgaagagaggcatagggtgagctatgggggaaggggtgtggagcttccatgcccttcttgggtgcaccaccctccaggaacctctgtgtgttcggctatgttgaagttcccaggccctgtccttttgggtttttataaaggcattgttaggtaggcaggattgattaaacctggtgatcaccttgaccttcagcccctctccgatccctggaggttgtggggtgggactgaaaatcccaaccctctaatcatgcctctctgttttccatgactatctttccagtgaccatggaccccatcctgaaggtatcagtcaacattagcatacaaaaagcgccttggagattccaaagatttgaggagttgtatgcaaggaaatggggatgaagcccaaatctgtatctcacagtatcacaactgtagcaggtgcttggtggggacacacttgggagatagtcagcgcacagggaattctcaggatatgacatgatcaatggccagtcaaggtttctgaaatgatattaatagattttctatcaggaatgtgacggagaccccaacctagagttgtttaaacaagtaagagttctctttatttctcatatagcaagttcagcagctcaaagctatcacagaattgggtcagctcaaagatatcacagaaatgcggtttttttgactggcctgttttggttataagattccagcagcatctgctgtcctagtggaactgcactttttagtgcagtttagcagaggccagcttaggacacagaggttctttccctcctcccttttatgaaggaggaaaatctctcctgaatctcctcagcagacttgcttgtatatctctttgccaagaactaggtcatatgcagagttagttgaagttaagtttggctgtaagtagtagaaaaactctaaataacaggggcttaaatgagcttgaagtttctatctgactgatgaccaaaatgtctggtggcaatccaggctgctgtggcacttcatggtgtcagggtcccaggctcttaccattatgcgctggttgtatcctccattctaccctccgtgtcccccaggttacctcaggtccccaagttggctgccgaagccccaaccattatagctccattccagacaggaaggagggaagataagtgtgacccccatccctataagttgcacaaaacatttccacttggattttattggccagatgttagttttatagtcacattcagatgcaaaggcaattcagaaatgtcttttccaggggtcatgtgtacagctgaaaaccaaggattatgaacagcagtatagccccatgcaggagctcctaacttggggatcatctgcaattcccaggcaggtccatgaatttggatggcaaaaataacatctttattttcattaacctttaacttacatttaacttcccttctgttatagattataatatcactatagtatatcataggtagcgttagcaaaacctgtgacttaccagtggaaatcaggagttgtgttcacatgtcatttctgctattatacatatcttctagtgttgtttatgttcacctctttcaaaattgcgttcattattagacctgctaaggggattcatggcaccaccccacccctctacaagagaaaaaccaaaaaaagccgggtgcagtggctcatgcctataatcctagcattttgggaggtcgaggtgggaggattgcttgagctcaggagtttgagggcagcttgggcaacatagtgaggcctcatccctacaaaaagttaaaaaactagctgggcttggtgacacctgcctgtagacccgtctacttgggtagctgaggcgggagaatcacttgagcccgggaggtcaaggctacagtgagctacgattgtgccactgcactccagcctgggtaacagagtgagaccctgcctcaaaacaacaacaagcacaacaaaaaagaaaaaacagagcaaatatgaatccatagtactggttaagaacctggtggctgggattcaaatcctggctttactaccagtaagctgtatgcagttaagctccctgtgcctttgtgttctctgcctcaagacgggggattctgtatttccctcatgggattgtgagggtcaaatgaattaaaacattaaagcctggggcatagtagagactaaggaaatatttactgttattattctgtcatggtgaaaaaagggaaaagaaacatcagtggaccagctgccacgatgtccttcttaataatctgaacaaaatcaggatgctgtcagtgaggcgtggttgccacggctgccattattaatcttcccctggtgctagggtgtccctgtagaatgtcattttgtactcaagacaaccctctgagggtaggtattctcatcatccccacttcacagatgagaaaattgaggctcagaaaggtacaaggattgcccaagattccacagctaatatgtaagcagtttagccttgaacctggacagtgcagctctgtagtaccaccctaggccatctttctcaagcattgatgatgctgtctgcctgaagaaacacttttaatgaaaccaaaagcagaatcccaaagaacagcagtggaaggaagggagctctctggatgggaaagcagcctgattgtcatgggcccacctcttgggcatccccagcttcaagttggggttcccacgaccccctctttgggtttgattaatttgctggagcggctcacagaactccaggaaacacttaggtttaccggtttattataaaggatattccaaaggatacagatgaagaggtgcatagggtgagctatggaggaaggggcggggagctttcgtgccatccctggggatgccaccctccaagaatgtgcatgttctgctatcaggaagctctctgaatcctttcctctttggtttttatggaagcttcatgatacaaacatttttgcctaaatgacagtatgatattgaaattgagtcaggctgcctggcttcattgctttccagtaagtgacagcctcacctctgtgcatcagtgtcctcactcgcctctgtgcatcagtgaagtggggacgctgctaacaatacatacctcagagcagttatgaggattcagtgtgttaatcatccatgtcaatcacttggattgctgccaagcacgtagcaaacaataaatgtttgttgctattgttctggcatttatgattatgattattaattgtaattattccctgtaccatctcattgtcctcagggctgttgctcacctagtatggccctagcccatgtgtatatttccccatagctcaggctgagagaagaacacacagatcaacttggagaaaacaaagaggaaagaaataggcaactaggtcaatactccccacagtattttatgttattttattttatttatttatttatttgagacagagtctcactctgtcacccaggctggagtgcagtggcaccatctcggctcactgcaagctccacctcccaggttcacgccattctcctgcctcagcctcccgagtagctgggactataggcgcccgccaccacgcccggctaatttctttttgtatttatggtagagacggggtttcaccgtgttagccaggatggtctcgatctcctaacctcatgatccgcctgcctcggcctcccaaggtgctgggattacaggcatgagccactgcgcctggcctccccacagtattttattatgaaagttttcagacatgcataactttggaagactaacacaagggtcagcagactacagtccatgggtccaattcagcccactgtctgcttttgcaagtaaagttattggaacacagctatgcctgtttgcttctctagttctggttctatggttgttttcagtgccacgcaagcagagttcagtagttaggtttgcaaagctgaaaataattactgtctggcaatgtatagaataagttttgctgacttctagcatagtgcagtgagcacctctatacttacaccccaggtcagtgattgttagtgtttgctatattagttttttatctttctataggtctgtctctatatacgttttattttttagctgaaaatcagttgcaggttttgtagtactttatcctgaggtccgtttaatgccagaatggtgagtttttggactacctgtatgaaagatttactgtgtgcatttttctgaggagagaccatcacaacacttcatcagatgctcatcgtctgtgatcgcagagatattcttcaactcctggaccggagaacccaactcacgcaagatcttagtcacttgtagacctcgtctcagttatgtaggrcctcagaacagaacaggctaagggagctcctgctcctcaacctcgccctgtccctacctgttctgcctctatccaggaagaaaggtcccccgtgggaccattagtcactctccccctcatgaaagcatttcctcccactctcacactcatgagctcattccattcttgtgacagtgctgggagctattaataataggagaggcctcgtggtgatgaagaaatgaggggagagtttcacagtctgtcctgccatcagagcagctggctttggatcccacactccctcggtgcttgctttggtagstgtctttacctctytgatcstcactttccaaagtggtgaaaagaggatattagccatgcttttcttttaggatctggaggatcaaatgaggtcccaacatgtaaatgcttgttgtgagatctattatgtgtgttagccaaatataatagttctctaggactgccacagcaaatcaccatgaactgggtagcttaacacaacgaatttattctctcacagttctggaggccggaagtctgaaatcaaggtctcggcagggttsgttccttttggaggctctgagggagacccattccatgcctctctggaagttaggacttctggtggctccagcaattccttgtgttcctgggcttgtggatgcatctcctggtctctccacccatcttcacatgcgtgccttcccctctgtatctgtcttcctttctgtctcttagaaggacactgtcactggattcaaggctaaccctccgtttaggatgatattatctggacacacttaactacgtctgcaaagactgttttgacgtgcacgtcactggattcaaggctaaccctccgtttagggtgatattatctggacacacttaactacgtctgcaaagactgttttgatgtgcacgtcactggattcaaggctaaccctccgtttaggatgatattatctggacacacttaactacgtctgcaaagaccgttttgacgtgcacgtcactggattcaaggctaaccctccgtttaggatgatattatctggacacacttaactacgcctgcaaagactgttttgacgtgcacgtcactgggacataactttttgaggctgctattcagcctcctgtactggtggtattattactactgctaatgctactcttgtttttgtagtcattttattacaataatttttttttctctttgagacaaagagtctcactctgttgcccaggctggagtgttgtttgttcttttacaatcacttagccagcaatcctggctttaaatcctgctccatgtgatcttagctgtctgaccctgagaggggcttttgttccccgagcctgtttccctgtctgtaaaatgggactccagctagtgacatgggtgcaggtgtgtggatgtgtttagccgaggaccgggcacagaggaagcgtgttataaacgtggctgctgctgttaaagtacagtgcattggcatgttacatgatactgtgtataggagaaagtgatgaagagagaggaggagagggagtacagttttcaacagagtggtcctggaaagtgcaactgagtaggtgtcaccttcataagacccaagggatgcttttgcatttgttgctgctgccactactattgttgttatttaatgattccctcgaggtcacagggtctcttggtgggtgtttgccaaattactcttgagcatcttcacatgtaaccaagcaaggcttccaggggctgactgggttgagagctgtcagaactcaygcgtgtctgggatttctaacattctcccctcctcttcttgttctctcattagcttcgcctcaacagcatcaagaagctgtccaccatcgccttggcccttggggttgaaaggacccgaagtgagcttctgcctttccttacaggtaacaaaggggacccctggggcccagatgtggggactcttgggaggyggttttcactatataagagaagacttgtggatttaacatattgtttgtgaatatctgccctgtgttagacactatggagtgggaaaagggattcagagaagtgcagtcttgctctaaaagaatggtctggaatgatggagacagatggtgaaagggatctagaagcaggtagaacgaggtttgagttgcagctccaacagttggaagctggtgactttagacaagttagtttacctgtttcttatatttttcatctgtagattgggataatcatccatgtgccaaagtgttgatctgagcattcaatgttaataacaattgctaatacttatgatatgcttactgtatgccaggtggtgttctacaccgtatcttgtgaggattgagttcatataaagtgtttagaaagctgcctgtactcagtaaacatacatcactatcatttcacccagttgatctcacagcagtgctttaagcaggtaatactgctgtccccatgttatagatgaagaaaccaaggtgtagagaggtgaagtgattcatttgcccaaggtcatgcagtgaggaggtaactgagaagggatatttatctagtcattctggcctttaacttgacagcattggttaatgactgatttcaaatctgagctctaccactttctaggtgtgtgactttgggcaagatattttacatctgcctgcttcagattcttcacaggtgaaatgggcataattatgtaacctaacatgaagactaaataagatactgtaaagtgcttataacactgtatagtacgtgccgcctaagcgatagctgccaggctgttactaagcactgctgtttgtgaggatgtaggtaaagcatttaatacactgtctgacacagactggaccacaattaatagtaaattctctgttatcattattcccattactacttcatattttatacttattaccagctgaaatcacagctgaaggttcagagtgctttgtcactaaactcttgtgtatgggaacatcttacttggacctagtgatgatcctggggaggaaggagcttgagattgttacccctccccacactggacagatggggtattggagcctaaagaggtgcagtgactcgcctacagtggcacagctagtgactgaggggtgcaggtgtgtctgactggatggtgcatgaagagtaggtgtctgctcgtatgacactgaacaaatggccccaaaccaggtggcttctattggtgaactgttggggagacttgaaagctttagaatgctgaagcatggcaggataataaagtggtgaagaagttgtagaggaaaaatgttggacctgggtttgcaataagcagctctgccactgacttgctaggaaaacctgagtaggtcactccacctctcttagcctcatttcccttgtctgtaaaggagtctaataagaggagtacctaacactcggggtgtgtagggaaaactctgtgactttcctctactttcacaccacagcaatcataacacagaacatgacttctgtgaccatatgtctgggtttttttccccaaactaagcagtggacagcagctggttgtcctctaattcagttctgacacgtctgcccagagacaggttcagatcccacagattgayagctcagtccccaggactgtccccagccctgaccaccagtcgctggtcctgtggaacttctgattgatcagcttcaagttgggrttcccacgaccccctctttgggtttgattaggctcatagaactcagggaaacacttatgtttactggtttattataaaggatwttgcaaaggatacagatgaagagatacagagaatgaggtgtgggggaaagggcctggagcttccgtgccctccctgagcccaccaccctcaagaacctctatgtgtttcaccatctggaagctctctgaaccctctgggtttttatggaagcttaatggcagagggtcctgagtggaacggaggcaccagccatgtggaactctgtgggaagagcatttcaggctgtggggagaggcagatgtaagctcagtgtgttggaagaatagcagtgaggtagccatgggttgagcaagattgttaagggagagtgagactaggacatgaggttggagaagaacagtgaccacagtatgtgagatcaggtttctttgaaactattggcagattgaaatgaaagagtgtcgggatttcttttacacctgaaagagtcactctggggtctgggagatcagatggtgtaggggcaaaggtggaagcaggaaaaccaggtaagaagctgttgcagtctcccaggcgacagctagtgatgatcagagtgaccttagtttgggagggttgacaggcttggctcagaaggagctgccaacccttccaagaaggatagttctctgtggattggtggaaagacaaggtgctggcagttcccaggtgtttggccttcagcagcattgcttggctataaggtctagactggagataaagatgaataagaattgagtccgtggatacgcataaggtcttcaggagacaaagaaaacagggagggtggttttaactgtgtgcagagggagccagggaaactgaggctgggaacgagcctaagaacagtgtagctggagtcacattggcgagaatttatttattgaaggaagaggcagagatactaaccctcctactgggccctgtgctgagctcttcaatgaaagcatttatttccctttagtctccgaacaaccctatgaagtgagaacagccctgtggtgatttaggggatgacaaaggctcagagagatgaagtgagctgctgtataagcagccaacagtaaagcaagatttgaacctaccataaaatggagatgatgataatgactccttaaatgagagggttgtggtaaggaggtgatgcagaagttgaacccaccacttacactcacacccctttggccagagcaaggttacgtggccttgccaactgcaagggcgtctgggaaatgcagtcggctgctggattgccatacacccaacttaaatgcaggaggtttaagtgccaatagatgccagggatattagcagcttgtgctgtgcagagatcagcagttcccactgcctcagggatgagaggatggagcttaagagagaggcctttggatgtgggcattagggacagaacggattttcccttcacatattcattctttcagcaaacctgaattgctgtctgtctgtgctcagctctggcaggaactggggcacagagaggagccagtcctgggctcgctgattatagcctatgttaaggatgtggtaaaggtggcatggaaggagagagagactgagcccagagaaggtgtagcggacatcctagaaatcttccaagaaggggcggctaaactgaatctccaaggataaaaataaatttctggcagagggaacagtgctgaggggagaagctggaccccaaaaaagctctcgttgaccatgctctgcgctttatacacctagtcatatttgctcctcactgtaaccgttgctacgagggagggatggtgaacaccattttacagacgcagaagctgggactcagagaggtggaatcactcagtcagtatttcacacccgctagagggcagaagcaggacttagggctctcttatcccagccaagcctgtaccttaatatctgtggcagcccaggtggagagtgggggagcaagtgggcggatggaagaactgagtgctgacagcctgaggaagcagaatggagtccatgtgttctgagcttgggctggggtcagagttgagatgggatagtcacgaagtctgtcttggttccacagataccatctatgatgaagatgaggtcctcctggccctggcagaacagctgggaaccttcactaccctggtgggaggcccagagtacgtgcactgcctgctggtgagtggaaggcaggaagtcctcttgcccaccccttagggtcggcccatggtcctgccggcctagggcagggaggggagygtgtcagagagcrtggggatcacgtcagaacagccgggccatggacatccrctttaatccaacaagtcaggagtggcttttaatatcgtgaactcagggtgcagttatcatcctttctgtttagtggtcaggtaggtgcccagtgccaggccttacctgggattctacatagggctgtgggtttagagtcaggttgggttctactgcttatttgctgtgtgacttgtaagagaattacttaccctctctgtgctgtacctttctcatctgcacaatggggttatgaaaacctttttaaattaccttgaagagccctagcacagtacttggcacttagtaggtactaaccgatgttaactgcaattgtcattattgttgctgtgacatcatatccagcctttggggtaggagggattccctgtttatgggtgagccacctggagcactgagaggttaagcgtctcttcagattgtatgactagtagatggcagagctgggattcttggtctgtccatttgactgtctgccaggtccccaccccactgcctgcctgtgtgtcccgtgctaggtgatggccaaggacacaaagatggkccagatcccaacaagcagcgttgtttgagagaagatgatctgggaaggcagaccgtacaggttacctagtcccctggttttcactgttctcagagtgctgggccrctgctgctgcctctgcctctgccccactcccccagtgattgtgtatttcactgtcgctagagatacaatgtggcaccggcagttgatggtgtattagttagcagcagcctttctcctagctctagtggtgtataaagaatggtgcttatcattgttgggatcttgggatttgagtaaatataacaatttgtttcttcccaaatagcattatgtaaagaaacttgatagttaccattaaattcggatatctcagccttcatctgggcatatgtgtataatttgtgcgtatggacacacagaaaattgtatacaaatagatcgtttcatacattttacacaaaacagggcttaacatgagcatgatgaggtttgggggccagcctagaaggggttccttgaatttcacaaaattatctgtagcccctgcctggtatttgtcaggtggaacttctgagcagtgaattcatagctttcagtagcttctcagaggacttaggagcagaagacattatttttatgaaaccgcaaggcttcaacaagggcccccagggtctgcaactgaggttgggactcaggcttgctgtggagctgggctgggacccagggatccttctcctacctggccagggtctcccaacagaacattctcagtgaggaaagtcccagtcaagccacgcttccttttgggaagcagttccctgtgaccgatgtgcctgacgttcatgtcagccagcagacacatcctggggctgtctgggccaggcagtgctggaaaccagagaagagttagatcagaatagcttgtgcttgctcgttgcctgcagtgcacatcccaagagccttacacagttgtatactgatgttagctgtattgcccagatgaggaaactgaggcacaggcagatttaagtgaattktccgagctgggaagaggcagagtccagattcgatcccaggcccctaattcttagccactcctatgtgctatcctcagagggctcctggttgctttcagagctgtaaacaagggaggcagggggrtccttaaacccagggaaggcgcctaacctgcttaggtgggatgggaagttgtcagggaaggcttcctggaggaggtggctgttaacctggattttgacaggttataagaaatagaaaatggctttgtgtagtttcttcattccacaaacattgagcaaggtctctaggctatggaaacccagagatgtgtcagacccactcccggccctygctctcagcagtggtgaaatggaattaattacagagactcctgtagctgcagtgtaaggattgtttttttgtttgttttgtttttttcccgagatggagtttcactcttgctgcacaggctggagtgcagtggcgggatctcggctcactgcaacctctgcctcccaggttcaggtgattctcctgcctcagcctcacgagtagctgagattacaggcgtgtgccaccgcacccagctaatttttgcatttttagtagagacggggtttcactttgttggtcagattagtctcggaatcctgacctcaggtgatccacccaccccggcctcccaaagtgctaggattacaggtgtgagccaccgtgcctgggtgtgagggttgtttctgtgtcagcagctctttttatttttatttttctttgagacagagtctcgctctgtcacccaggctggagtgcagtgttgtaatctcagctcactgcagcctctgcctcccgggttcaagtgattctcaagcctcagcctcccaagtagctgggattacaggcacccatcaccatgcctggctaatttttgtattttttgtagagacagggtttcaccatgttggccaggctggtctagaactcctggcctcaaatgatcacctgccttggcctcccaaagttctgggattacaggcgtgagccaccgcatccggccagcagttcctaactcttttggaattatggatccctttgagaatctgttaaattctggaccctcttcttataaaagtacacaggattttaggcggttcacactcttccctaccctgtgtggtctccaggtttgagaacccttgcccccagacttcacagagaggcttcacagtagtgagtcttcactgtgcaaaggcatcaattgcagtttcttaaatgtgtaccttcctgggccctgcctccagatattctgattgttttggtccatgctgggataggcctccgggtgattctgctgcagggtggtcagggatcatcctttgagaactacttcctgcagtaacctacaggagaagagaaccttggcttacataattactgctcagcctctgtcccaggcctccttataacagattgccgtaagttccaccggtagtcacttggcaagtgttgattgagtaccttctctgtgccagcccaggtggtgggagaactgaggtgaacaagaggaactctgtccctgcagtatcccagtcacaccgcacctatggtcacactcccatgatactgtcctgaacttgagacgtcacgatagcatgaggacctgtgacagtgacattatgctggcttgcttagtattacatttttcctttgaatcattcattgcaactatttttaaatgctatttttaaacatttgtttttattcttagttttactgtaaaaatatacatagaatgtgctattttaattattttaaagtgtgtagctctgtggcrgtaggtttattcacattgtgcagccattatcaccctccatctccagaatttttcacctcctcaaactgaaattccaaacccattggacatgagctcccccttccctctcccccagcccctggcagccaccgtaggagtttgactgttctagattcctcatataagtggaatcagaaaatatttgtctttatgactattagctaatttcccttggcataacatcttcaaggttcatccatgttgtagcatgtgttacatgagacttctcacatacaagattcttgagtttttttgagggctgcatttggaaaaccagatttgcttattgccagctgcattctcccatagtgacagtccttggagctggggagcacctgccctccctgggctacatgccctccagggtgccacagtgcctgcctcttcctattcatgcctcctgccacccctgcctgtcaccttggctgatggcatcattctgttacttgactgagccctggaggcatttccatttatgattttttttttcctgctttaaatacctgtcagcccaagttgaatttcagatcagagacctccacacctttatttgaacatattgggataagttgagtctcccttcagtaggtcactaattaagagttcctgtcttgtgctaagagtgctgctgggctctggggatacagtggagagccagtcgtatgtatctgaaggagcacagtcattctaggcccacagtaacaaccagcgagcagtcccgagccccatagtcccccagaaacatgagatcccaattcagtcaccagagctgtgtgtaactgttcatgggaagcttaggtcaggttttcgatcctgacctgtagctattactagcttgggcaagccaggctgtayctcagttttctcttcttttttttttttttttttttctttttgagacggagtctcgctgtgttgcccaggctggagtgcagtggtgcgatctcggcttactgcagcctctgcctcccgggttcaaggattcttctgcctcagcctcccgagtagctgggattacaggtgcgcaccaccacacccagctaatttttttgtatttttagtagaaacggggtttcaccatattggccaggctggtcttgaactcctgacctcgtgatccacccgcttcagcctcccatagtgctgggattacaggcgtgagccactgcgcccggcccgttttctcttctttaaaatcaggacttgctttatagaattcagtgaggaagaacaagcacccctggtacaacacggaggtcctgcctagtacacacagtgagtagatgttctacacagtgtcagtgatgatcattgcactttgagaggctaagaactttctcctcagaaagcaacgtgtgtaattttaaggtttatggaccccagtgaaactccttcaaggacccctaaataagaacctttgtggaaggcacgctgacagagaccttctgctggctggcataatattacgtttttcctttgagtcatwcattgcaaccatttttaaaggctattttaatgaaggtcgggatgggtaatagggaagttttctctgaggagatgagcccatgatggggtgcaggatggggctccagggctgcggatggtggagagggagctgtccagtgactttgtgttctcaccacagccaccgctggagtcgctggccacagtggaggagacagtggtgcgggacaaggcagtggagtccttacgggccatctcacacgagcactcgccctctgacctggaggcgcactttgtgccgctagtgaagcggctggcgggcggcgactggttcacctcccgcacctcggcctgcggcctcttctccgtctgctacccccgagtgtcyagtgctgtgaaggcggaacttcgacagtgagtctctgcctccttggaagctccaagctcccatctcagctccaaccttctctaaagcctcagactccttttggtctagctggggcccaaatgcccctgaactctctccactcccactcctgcttaccacctgataggccacatcctcgagagttggtctctggacacggccacgtgtcagtttacccacctctgcccccttgctcacttaggaattgagatgatgacaggtcctccttcccactggttaatgtgaggatttaaaagaattatcacacataaagtgcttagagcaaaatctggaacataaaaactttcagcaacttacatctgatggtatctccagcctgtcccaggtccagtgcctttggcagataaaccacctcagttttcagcctcctgctcgtctactttgcaaacgattgaccgtcaagcccgggtttgagcctgactcactccagaactctggtttatggctgtacacttgcttagatacttacactggcccccaccgcctttgaycgaagcaattgctgctgaaaaataaagcctttctgtggctctagacctgcctcttagttaagcagttttttgtttgtttgttttttgagataggatctcgctctgtcatccaggctgaagtgcactggtgcagtcatagcccactgcagcctcaacctcctgggctcaagcattcctcctgccttagcctctcaaatagctgggaccacaggtgtgcaacaccacgctgggctcattttttatttttggcagagatggggtctcactatgttgctcaggctggtcttgaactcctgggctcaagcaatcctcctgccttggtcttccaaagtgttcagattacaggtatgagccactgtgcctggctcgttggttaagcaatttttatgggaatgatgtaatcgtcagcacttagcattgactagatttattatgcgcaatctgcgaagtgtctcacacacactattttcatttaaacctcatgcggacctgtggggtaggtactgttactatcagctccgtttcatagggctgggaagacagagagggggtcatcacttgcccaaggtcattcagctaaaacctggacccacacaactgcagagtctgtgcttgctcctctctgccatactgcctgctgcctcaggatccccgtccccgactcccaggtacttccggaacctgtgctcagatgacacccccatggtgcggcgggccgcagcctccaagctgggggagtttgccaaggtgctggagctggacaacgtcaagagtgagatcatccccatgttctccaacctggcctctgacgagcaggtgagttttgcttcctggccctctgctctcccgtccttctggtggttcctgcccatraaagagaatcccagagctcagcaaggcctctgctgccctcccactgttcctctcctctccctaggactcggtgcggctgctggcggtggaggcgtgcgtgaacatcgcccagcttctgccccaggaggatctggaggccctggtgatgcccactctgcgccaggccgctgaagacaagtcctggcgcgtccgctacatggtggctgacaagttcacagaggtagatgagcgaccgttgacattgtcccactggtggggacactgacactctcagaagggaagcatataggagctgaggtttccattaggccgatggaaccattgggcgtttgagcaataagatctctatgatcatctaactgcgtctcgcttcgtgtgccaatcctggttgattgacatggcatcttaaagtgctgccttgagaaagattctgaggcaaagttaaggctacgtggaggaaagtgccacaggagcagagaagggtagcacatgtggggtgttcctgacataatcaagctgtcctttcacaaaggggaagacagcccaaaaaggtggggttttttggtgttttttttttttttttttttttttttttttaagatggagtctgtcgcccaggctagagtcttgttacccagctggagtgtggtggcgcaatcttggctcactgcagcctgtccctcccgggtgcaggcatttctcctgcctcagcctcctgagggactgggattacagatgcccaccacgacacccggctagtttttgtatttttattagagacggggtttcaccatgttgttagccaggctagtctcgaactcctgacctcaagcgatccgcctgccttcatctcccaaagtgctgggattacaggtgttagccaccgcgcccagccccggaaagtttaattaactgatcagagtgacactaccagccaggcagaaaggggacaagactccaggtctgtgactctcaggacagtgctccttccacagggatccagattgcctcatcccacaaacatgtttgctgagcaccagctatttgctgggccagtgaattcggatcattcctggccttcatggagcyaggcagtctgaaggggaagactgacttaggggaaatttgattataaagtgtcacaggtgtgggacagacagacagatgtggggccttggaagcattgaggaggggaggtggtgttacagctggttctagaagatgagtgggtaagagctaagataggaactttgttccagccagaggacaaagaaccctgggaggtgagagcaagtgcaagcaggaacattcaggcctgatcttgatggcccagcctgagagaaagcaggagagagggcagggtgggatcggagagagggcagggtgggatcagagaggccttgagtgccactccaccctgaggcgccctttgcctttaattatgctggttcccactrgcatttgcgggaaggactcagagcttcagaatagcgtaccatcaccacagttagggaaggttcttcccatccttgtctcctgagctgcataaactgtgtcacactgggtcttagaataaaaattccatgagggcaggaattttaggctgttaaaccagttcttggcacatagtagacattcagtaaatatttgcaagatgaataaaaggcagtattttcccaagatatcatgaggtccttcaagatttttacttgttcattcccgtcttcataatgaactgtcctgcttcctaccaggtcttcaggaaccagctttgcagcaggagccgtgcgtctttccatgcctggtgccatgaaacaggcagggccaagcgtgcctccctttttttttttttttaagacagagtctcagtcttttgcccaggctggagtacggtggcacaagctcagctgactgcaacctccacctcccagactcaagtgattctcgtgccttagcctcctgagtagctggaattacaggtgtgcaccaccacacccagctaattttgtatttttagtagagatggggtttcaccatgttggccaggctggtctcgaattcctggcctcaagtgatccacccacctcggtctcccaaagcgctgggattacaggtgtaagccactacgcccagccctagagtgccttcctttctgtcaatctttattgttttatttttattttgagacagggtctcacaccatcacccaggctggagtgcagtggcacagtcacggctcactgcagccttgacctcctgggctcaggtgatcctcccacttcagccttctgagtagctaggacgataggtgcctgcccccacacccggctaattgttttgttttttttgtagagtcagggtttcactgtgttgcccgggctggtcttgttctctgggactcaagcgatctgtccacctcagcttcccaaagtgctgggattataggcatgagccatcgcacttggcctattgttttattttcattacaaaagtaattcgtgcttctggtaacagatctttaagaaatacagccatatataaatcaaaaagttgcagtcactatatcatttgaatgtttttgaatcaggtaacagaaaacttaacctcagtagcctgaataatatggaaatgtgttatttttaatgctgacaacacygtgaggtaggtgccctcgcagtcctcatttttctttggaagcaaaagaggctcagcgaggtgaagagccttgccccggggccagwcttggcactcgaattagattttagcactgcttccaaggcccacgctctgtcccctaattctggtgccttcactttgattttggcttccttagcccagagtaarctgccagcccctctcactctcccsctcctccttcctgtctgcagctccagaaagcagtggggcctgagatcaccaagacagacctggtccctgccttccagaacctgatgaaagactgtgaggccgaggtgagggccgcagcctcccacaaggtcaaaggttggtgctggcagccggaacacagcaagtggggtgggtatccraggggctggaggtggaactagcacatcaggtctcacttccctttgcctccctctccctgcccacagagttctgtgaaaacctctcagctgactgtcgggagaatgtgatcatgtcccagatcttgccctgcatcaaggtaacagagagtttgatgggaggaaccaagtggatccgagcctgccaaaaagaggggctggagacaaggctttggggatagtcagctgcaaactaggttcccagccctctgggaccaggcagctcttgggtttcaagcagttaggggtcctgactgcagcttgaggctgaccttaaaggtggaagtactttctagaacctcagatgtcactgagtcctgtcattcacagggttttggggttggagtgggggctgctgagagcargggtcattgaactcttaagtaggtggtactcataaggaatagtgatttcccctgtaccctaagccatcccctgctctatgaatgagaggggcagaagcaggttattgtctcttaggagttggcatctgcttagccacttgctgctgcaggggttgcactgacccctgtgcctgcctcttctctctcccaggagctggtgtccgatgccaaccaacatgtcaagtctgccctggcctcagtcatcatgggtctctctcccatcttgggcaaagacaacaccatcgagcacctcttgcccctcttcctggctcagctgaaggatgaggtaagggcaccaggatctcagctctgggtttgtggaggggacaggcgggtcttcctagattgctagggtttacctagattgaccaggaatctgctgatatctcaacagacatccagatctttgctgagttgcatgtttgtgggcatagctgtgtgttcatgcgttcattcctccaggcactcttcatgaggcctttcctggacatggaggatatgaaaaatagaaatttaaagtttttatttatggccaggcgcggtggctcacgcctgtaatcccagcactttgggaggctgaggcgggtggatcacctgaggtcaggagttcgagaccagcctggccaacatgatgaaacctcgtgtctgctaaaaatgcaaaaattagccaggcatggtggcgagtgcctgtaatctcagctactcgggcagctaaggcaggagtatcacttgaactcaggaggcagaggttgcaatgagccaagattgcaccactgcactccagcctggacaacagagcaagactctgtctcaaaaaaaaaattatttatttatgttttgagatagggtcttgctctattgcccacactgcagtgcagtgatgtgatcatggtctactgcagcctccaccttccaggctcaagtgatcctcccaccttagcctcccaagtagctgggactacaggcaagagccaccacatctagataattttaaaaaacattttccatagagacaagatattatgttgcccaggttggtcttgaactcctgatctcaagcagtccttttgccttggcctccaaaggcctgggattataggcgtgagccgctgcccccagcctagaataagagttttgatccccaaaagccttcagagactggcagtggagagagacaggcagtcccatgatgccattaaggtgttacaggtgctgttaaggatgagttcatgttttttagggtttaggctaaggtgctctaatatagaccccagaatacattctggcttaaattcggtggtggattttttttctctctctcataacagtctaggacgagattcctcacatgtgcttgcaccccatacacccattggccaggagggtcacgtgaccacacccagcagttcaggttgcctgtattacaaaggatgagaggcggtgctgggtgatgactggagagatcatcagggtgaccactggggaaggagtttggacttgactgtgggcaagcggaagagccagaatagagttggtgttagaaggcaccctgaggcttatgtgaaggaaggattgaagtgaggtggccagcagcagtgtaggcagaccaaaccggaggctgtgggagtctggaaggctgaggctagactaagtggtatgtagagatgaggctgcattgatacggaaggattcaagattgttcaggaggcagaagggaccacgtggtggtttttgccttggtggtgaaaaactgggcagatggtgcaattgtgtgctggtgtgtgacatctttcccaaaagatgggaagtgtgtgaggcttcccaaaagcctcagtctttcttccccatccccttctttcttttttatacacaggcgcccacacagtctgctagaaagttggaggaaatactgtaacagaaagtactgcatcacatttcagtcctccatgcccctaaaagttacgttattcaattctgttacagtggagtaatctcttagccccagaattacagtgaattttttaatacattgaaaagagtgcgctatttttaatatttttttgttctttttgtttttccctattagtgggtgattaactgtactggttttaatcagttaattacgtcagttgctaaaagtctgaatcttcattartgttcatgacraattttatracttaagtaatttatctgagttatgcttcacatgcacatagtttttataattttatagatattaatacaatttatatttgtttttgatgctttaatgggcataatttggcaggtgagagcccctcaagttgtctgctatgtcatttcacacctctccagcgttttggggatcattttgcctctggcatgagggaaggatccaggctcagcccagtttgaaggcaagcccatacgtgctgcaagtgcgctaggactggagcattttttgctccagtttcaccttcagcaagcgctatatggtaatcgtgtgctggcagccagcctgtctyagggcagcttctcttagaagaaaagaaccagcatggttttcttggtgtgaggaattcatctgacttatatttgagatttccattttagatttataaactttatattttacattttgactctcaccagaatttataaacttgtctaaatgaaaaaggctacctttttactggtgcaccaaaaataagtctttttaaatgggtgaggtatagtctctgagccttctcttctcatgcacatgttcagcagcttgaggctcacacagcaagggctggagctgggcaagggccagtcctatcctcggaatgtgcagggtttcaacagcccaagcctgccaggcttgttcacttggttattgattcatttcagtgctcctttatttatttatttttttagactaaaatagttttaataaggaaatagttttcttccttcccttctcccatgttgtggattgatacccagaaaggaacccttgttagcaagcagcggagctaggattagaagaatcatgtctgcctgttttttccagggtgctgtattttcctactgtgattcttaaagtcttttcaaaatggataaacatttcttgtgatactattgtaaggtttaaaaatctgcttaagttagtgatccatgctgcttgctttttgtgtgccgttaatgtgttcccagaacggggagctgggcttggacaggagtagtccctcgggagatgtccataaaagttgatgcagctgagctctttccatcctgtcctgggttgctgtgtgcattgcattctctcagaatccttctttcctctcctcagtgccctgaggtacggctgaacatcatctctaacctggactgtgtgaacgaggtgattggcatccggcagctgtcccagtccctgctccctgccattgtggagctggctgaggacgccaagtggcgggtgcggctggccatcattgagtacatgcccctcctggctggacagctggtgagtgaggaggcctgggggccaggcagtgctgcctcaggggaggtgcagtatgtccagggctgtgatggggaaacggggctttgaaggcttagtggaggctgtgacaactgcctggggagtcgaaggaagggacccaggaaatagggccttaaaagatgcattggattcaataagagagaggagggaaaggagcacctcagacaaagttgagaagtgtccggtctttctagggtgggtgtaggttccatgggatgtggctagcagctccccctgtttgctctcctggaacgcttaccttggaacccttggtttctcctgtagggagtggagttctttgatgagaaacttaactccttgtgcatggcctggcttgtggatcatggtgagtaccttcacaggagcagcaagaggagatgggagctccagaaaggcaggatggattggctggggctgtggcgggcagyggaggaggctagagtcactccccacgccgctggatgctcgtatggaccagctcgcatgcttgttagagtcctagagaagtgttgagtgggaggaggacgaaacagatcacccaggggttgcctggtatagtggagagccagagggccactgagcagccagaccagggttttgaatcctgcccttggggctgtcagatctaaaacaagtcacctgctgtctttgaatgagccccacactcattctttgaaacttcttattctggtgccttggggccattatgagaatggctcattgtttacactaagagaggtaaaaaataaaaggtaatatttatctctgtgaagccctgtttgaagtaataagtgccacataatttaggcaaatcacttcttagagccttagtttgcccatctgtaaaatgaagccagtagtggaacctacctcttggagtggttgaaaagatactgtataaaaaaaaacagttactagatatagcacatagtaagtccttttttctctctttggctcacatgcagcctggcacctaggggctgctttgtaagccatggtgagtgtgacctacattttgcccacatcagttcttcacctccaaatccctgtctctctcaccctcacccttctgcagtatatgccatccgcgaggcagccaccagcaacctgaagaagctagtggaaaagtttgggaaggagtgggcccatgccacaatcatccccaaggtcttggccatgtccggagaccccaactacctgcaccgcatgactacgctcttctgcatcaatgtgagccttccacctgcctgctggcccatccctagggaactggagcgcgtgggagaggagggatgctagagggttccccaagggagacacctggcttgggaatggagacatggagtgcatcttctatccagagatgagtccttggggaactgcaggcaagggggtggggctcccagggtcagggtcatagggcctctgggactggggacttggatggtgagggacccagggcctgggagacttgacctgttggagcagcgatctcaagctttatgagcacccctctccttccctgagaaatgtgtgtctctatctgtggtgcgttgggtgagtgtatgggctctaggtcagacctagttttaaattctggtactgccatatattagctatggaccttggatagttacctaaccgatgctttggtcttctcatttgtaaakaattcatactgtaaagaattcatactggtaatcacagcctggtgagcgtgaagattaatcaggttatacacgcacagggcttagaacagttatgctacaggtaggaagtgctcctgtctatttgcttttcctacgattataattatctcatgtactacttatttatgtgtaaaccatacacagggctagaaaggaagggatttaaaaataaatataactaagtgttctgatcatttcttcccacgccactctctggagagcattgctttaaggagggatcctagggcttggtaattaaggtcgatctccagaataattaagggaagcctgaggacagagaaactgggacatggtgttaggatggtgttagtggagttgggagattcactccactaactgagtcacccgtattgctcagcctctgtggggcctgatgatcaccagrgtggcctggtcagaggcagcaggaaatgagagttagccaggagctttgcatactcacccctgccacycactggcccccaggtgctgtctgaggtctgtgggcaggacatcaccaccaagcacatgctacccacggttctgcgcatggctggggacccggttgccaatgtccgcttcaatgtggccaagtctctgcagaagatagggcccatcctggacaacaggtgaggtctggatactcccccacacactggcaggggcttcttgtgggcaccttaatctttgacctttgaaggtagagcccagggtcagaggcctggcagcgctccttgcttgctgtgtgaccttggctcccttcccttctcaaggtgtgttttctcaactgtaaaatgaacatcacagcatgaaatagaaagagggggtgatgggttggcagtcctgtatactagcaacaagtcattagaaaatgaaatcaccttatgttttatatgtaagtatgtgtataatttataattgcaccaaaaatatcaaatagccaggaataaattcaatgaaagatgtgtatgtaacacctctaatgtaaactgtaaaacactaatgtgagaaattaaagcagacctgaccaaggtgggcggatcagttgaggtcaggagttcacgaccagcctggccaacatggcgaaaccccgtctctagtaaaaatacaaaaaattagccggtgcggtagcactcacctgtaatcctagctatttgggaggctgaaggcaagagaattgcttgaatccaggaggtggaggttgcagtgagctgagatcatgccactgcactccagcctgggcgatagagcgagactgtctcaaaaaaaattaaagcagacctacataatattcacggatgggacagttccctgaactcatctttagattcagtataagcccaataatcttaacaggttctttagtggaaaattgacacttctaatgaacaaagttgtctgatttacactaccagagacgaagacttatgacaccacaataattaaaatagatgtgaacacaagcatatttaaatcgcccaatagaatggaatcaagggtacagaaacagtcccacatgtgtttaacagtaggcatctctgcagttcagtggagaaatgtatgttttttaaaaaacatagctgagtcaatttgatatcyatttaggaataaaagaaggctcgcctcaatgcataaacaaattaatttgagatgacagaccagaaccagaaagattttaaaaataaaggacctagaagaaaatgtaggaaaatatcttcttgagttagcgtaggcacagatttgttaaacagcaaaccagaggaagtgatgggtaagttgaccttctgtaaaatgtaacgctgtttctcaaaagacagcattttgagagtaaaatgcaagccactgactggaggaagatgttttaatatatgtttctgagaaaggactcatccacaatacctgtctacaaatcaggcaagacaagaaagagatggggaaaaagacttgaataggcacttgaaaaaggatctccaaatagccagtaagcatatgacaagggtgttcagcatcattagccttcaggaaaatgcaaattaaatctcagtgacatatgactacacgcctcccagaacagccaacattaaaaaagactcagtggtgcaaatggtgaagacatagaagagctggaactctcatccattgcacgtggggctgtacmtttagggtttgatcactctgaaaacgggagtggatctggagtggaatttggtgaagcttgttatacaaacagcctgtgaaacagcccttccactcctgggtctctatccaggagaaatgagtgctgtttctgtcagaagaatgttcatggtagctttattcatagtagccgtaaaaatggaaacaacctccatgtctgtccacagtagagtagataaattttagttcattcaaacagtggaaaactattcagcagtgacgaaacaaatgcctgctataagcagcaacaggtgactctcacagataccatgttgagtgaggagccaaaatcaagaaaacacaccatttatgtcaagttcagaaacaggcagaatgaaggaatcgagatgatggaagtaagaatagtggttatttggggagaacagggaactgtcaactgaaagtgtgggacccacaactgcagatttctctttctgtctgttccaggacacaacctcagctttagtttctctccgaagtccccctccgttttccaaaacaattgactcttggtgcaggcggatttccctgggccccatagatgagagtggatgcctcctctgggctcctggaggaccaggaacttccccttggggccacttaccactcccctcttacgtaccagtttggtctcttcctcctggcccgggtgcctcatggcagaaatcaagagtgatttagctctgtattcactcctaatacattgtaggcctcagtgaatatgtgtgaaatcaatgaaagatacccatttgctgggcctcagagacttgggggttctgagattctgttccactttcccagcctgctctgatctccctgtttggggccccagtccttgtttatcatacttctgacctttaagtaattggttggttggttggttttttgcagtttgtttggttttcctttgaggcagaatctcgctctgtcgcccagactggagtacagtggtgcgatctcggctcactgcaacctctgcctcctgggttcaggcagttcttgtgcctcagcctttcaagtagctgggattacaagtgtgcaccaccatgcttggctaatttttgtactttgagtagagatgggggttttcccatgttgtccaggctggtcttgaactcctggcctcaagtggtctgcccaccttggcgtcccaaagtgctaggattacaggcttgagcccccgtgctcggccttgagtttacctttttttttttttttttttttttgagacggagtttcgctcttgttgcccaggctggagtgcaatgatgcaatcttggctcaccacaacctccgcctcccaggttccagcaattctcctgcctcagcctcccaagtagctgggatcacaggcgtgcaccaccacgccctgctaattttgtgtttttagtagggacagggtttctccatgttggtttggccaggctggtctcaaactcccaacctcagatgatccacccaccttggcctcccaaaatgctgggattacagatgtgagccaccacgtccggcctgattttacttttaattgactcataattttatatatttatgggggtatagtagtgtttcaataatgtgtgcaaatgtgtaatgatcaaattaggataattagcatatctatcaccttaaatgtttactgtttctttgtgatgagaacattcaaaatcttctcttatagctgttttgaaatatgcaaaatgttattattaactatggtcacccgcctgtgcagtgatcagagatttctaattcctgtgtgtgccctggattcttgagactcctcccaccttgggtttggtgtatccgtgtctgtgtacactctcttgcccaagagccctgtgcccacctgttgccccagtccatcctggctcaccctctctctccctgtctcctttcgctttccagcaccttgcagagtgaagtcaagcccatcctagagaagctgacccaggaccaggatgtggaygtcaaatactttgcccaggaggctctgactggtaagacctagaaagcacggmgccctagcaggagggtggactttgaggacaggcactgggcctgtgggcagcagcttctgggagggggaggtaccttggcattgtgggcagagagagggctctggttctgattcttgcctgttcctgttttcctagttctgtctctcgcctgatgctggaagaggagcaaacactggcctctggtgtccaccctccaacccccacaagtccctctttggggagacactggggggcctttggctgtcactccctgtgcatggtctgaccccaggccccttcccccagcacggttcctcctctccccagcctgggaagatgtctcactgtccacctcccaacgggctaggggagcacggggttggacaggacagtgaccttgggaggaaggggctactccgcccacgtcagggagagatgtgagcatcccgggtcactggatcctgctgctgtaatgggaacccctcccccatttacttctccacctcccgtcctccccatcattggtttttttttgtgtgtcaactgtgccgtttttattttattccttttattttcccccttttcacagagaaataaaggtctagaagtagttggtcctctggccttagtcatcagcwtggaggagggggcaccaccccagagccacaacatctgcgcttttctctggagaagatcttgttacaggacccattatacccctatgtcccgaaagaatactctggggatccccccaggagtgctgctggcctttggggtagagggtccatgaggtgctctgggtggtgtcctgtagtgcagttcagattcatagatgtcggccgagtatttggggggttaagagcaggtgccttggaaccagactgcctgggtccaaattgtggctccttcagttaatagacgtgtgactaggagtagcttgttaagtctttatgagctcagttttgtattgtgtaaaatgagagttacagtaatacctagattgcagggtgggtggcgaggaccaagtgaattagtacctggaaagtgtgtaacagtttcaacatgagaagtacacaacatgagaagcagagttagctgtacattgccagagaaccccctgtgggccatttcctgtgttcttgaagaagacttgggcttggaccctgtccccaggaggtctcagagtaatcaggacggtactagggagagaactgtggcaagatagatcagttatctcggtatctattctccccttcctaatgtagaagctctgatttttagctgggcagatgactacatggattcaaggtattttcctagtgtctcttgaaattaggtgtggtattgtgaccaaattctagccaaaaagatgttgaacagaagtggtatatgcagcttctaggaagtgttcttaagggggaaggcgtcatcccccacctttcctccttcctgcactctggaatgtggaccagatggctggagtaggagctgccacctggggccagaaaatgatcttaggcgtgaaggtcaagtaaggcaggacaagagagaaggagcctgcctccccgaggctgtgaagagccatgccagtactgtcacctgggagaattaaactggtcaagtgcctgttcgtttagggtttcatcacttgaaggtgaccggaattctaactgatggagggaggggcccagagcaccctggagaaaggagcaagggacgtatggctggtggtgtctgcatggaagggtttcacagaggaaatgatgcttgagcacattttgacccaggtggtggaagggaaatgtggctttgagtgacaaggtgatttcaccagctcagccttcatattaccacatccctaccctttgttagactttattgtgccctaggggatgaggctgaaggagaccaaaaagcatctttagaaatttccatttatgccctgggcgataaactctctcccagttgagaactactgctctagaaatgtgaacacacgtgtaaccaaacgtcaaagtctgacattaaactttgactttccccatggttaacgctgctggtccattgtaacaagagtgcagtggaccagcagcctttgcattctcaggagcttgttagaaatgcagagcctctcgtccctgccccgacctgctcaggcagagccttcattttaacaagatgcccaggttcatctgcacactgaagttagagaagtcctgccttaaatactaacccagtttttctctcttgagagtgaggttaatgctacgtgggtctagggctgaggatgtgctatggctcagaggtggggtctacaattggacatgtgtatgtagacaaggctcagggatatgttgaggctgctagattgggcaagtgatggaatgggattattacaggaggtggaggtgcgatggatacccaggatgtgctgggtaatgaggtgatactcagcgaccacaggagtgagtatgagagacgagggtgaaggatagcttgagttattgaacgctggcagagtcctgagttaaccaggagttgcctggtgtcttgggtcatgtgctctagaagcagagcccgagtggagactcgttcaagtgtgttactgagggagtgctctcaggagaacggactgaggtaactcaccttctgtgagcttcatgttggaagaatccaatcaggtgatgaatgtgatgttattaagtccattgttaggagtggttcctaatctcccaggctgcaggctttgtttgctccatacacctggccttctctgtagcagctgaagtttgatgctggagctgggtcagggtggagagactgtgtggagccaggactcatgaccctggcctgtttctcccgctctctaggcctaaatcccagcagtcacactggccatctctaatggttccttccacagcactgttcttcagagcccacacacaaattttgtctccttttgtgatgactgcacttctttggctgtttttgccaacagcctcttcactgaccccttccttccactgcattgacccagacatctggatgtggatgaggtcgagtcacttgttgcctttggctaatgcataggggcacgagtagagctctagaatcaccatgcccttgactcagggtgcagaatctgcctatggtgcttgagctgtggttgtcgctagaggagaattaccatggctcccccgggcagatgaagatgacgaggtggtgcctcagccccgaggagtgaactgcagggcaccgacaagattctgcctgtggccatcagggctggagggaaggaggccaggttcatctacccaagctggtggcatgaggcataaatttaaaaaaattggtgtgggcacagtggctcgcacctgtaatcccagcgctttgggaggccgaggtgggcggatcacctgaggccgggagttcgagaccatcctgaccaattcagtgaaaccctgtctttactaaaaatatgaaaaaattagctgggcgtggtggagggcgcctgtaatcccagctactcaggaggctgaggcgggaggattgcttgaacctgggaggcagaggttgcagtgagcctagattgggccattgcactccagccagggtgacagagcaagaccccatatgaaaaaaaataataattcaggaacttgtcaaaaagagaaaatccaataaagatttagtgccaggccttgactccagcaggccttccccgctctctcgatgtcttgccatacagagctgcaaggtggtggggggttacaggctttgtagggctggatttttcccagtcggcctccaggaagggtaagagactagtagctcgaagtttgggttggctgattgggtccttcccagacttcggaggagggaagggaaacctgaggccccaactcttcatggggaatcactgctctctgtccccaagagcacatgcctttcctgacagaagctgagtagcgggaatctgcttccacccaccccttagcttgggcttaggctcagtccccaccctgctgttcctgtaccctgtgcatattctagagcagtagggagaatgggccttccctgatgctgaaaataagaatgaggggctagaactccaatctcactctctaggcaaatggcagatgtttattattcatgaatactgttgagttaattcaggtctgtgttcctttgctgttactcctcttttttcgtatattttgtacagatactaagcttttattttattttattttttgagacggagttttgctcttgttgcccaggctggagtgcactggcactccacctcccaggttcaagcgattctcctgcctcagcctcacaagtagctgggattacaggcatgcgccaccacgcccgcctaattttctatttttagtagagacggggtttctccgtgttggtcatgctggtctcaaactcccgacctcagatcatccgcccgcctcagcctcccaaaatgctgggattacaggggtgagccaccgcacccagccatttttgtttactttttgagatggagtctcgctctgttgcccaggctggagggcagtggtgcaatctccactcactgtaacctccacctcctgggttgaagcgattctcctgcctcagcctcctgagtagctgttactcttaacatggataaaaatactttaaaaatttttcttttttgggaaactaaaagatatgcgattctcaattgattattcagtctgtggccttctactgaaggagcatacagaatctcacctccaggagcatggagctctcttggataggatcctgctttctgaggccagagcttactctcctatgtgatcagaggctttcacagcatccgcagtggtctccagatcagccctatcatggaggcttggtccagagatcttcatatgaaaagggaaataataagtgtctgggagacacttctgcagggatcctgccctgtctcaataatctcccccatggccacagaaataccctgggattttcccaggagctagccgacacacacagatagattatgaacttcagatagaagccccagcctagccctcactctgatacctgtcatccccaaactgctctgaagtgcttatgtgctggtatctcccaagagtctgcatgtcagtgtgtctgtgctagtgtaatttatttagaaaagtgcaaaggcaaagggcaggatcaacaggcaaagggcaggatcctggaggctggatctagggtcctcttacctgatttatgtcactgattttcccaaatattgataaaaatgaattgatctctaggtggcagagaaacaggaggaaccctagactacatagtaagtagaaaataatgctgcatgtcatttagattgagctcagccctgagtcatgaagtcttcagaacaaaggaatagttctcccttatctgatgctcactgtggccttgggcagcctggcatcgagaattctcagcatgttcactcttgagttctgtgcctgcatcacacagcaatggaacagtcccaaaagattcttaagggtggggaaaggcactaagaaaagatgaacctgcagtccctgttataccatctggtctaattgatactactgttgtcaagcaaaaggagctctctccctgaggcactggaagccaatattttgacaccaggtttttgagaaagaaaagttttttattgtaagttgactcacaagatgagtcaagctcaaatctgtctccctgtgctggttttaaggcagtaatttaattataaaacgtttaggaggtggattctggggttctcaggtgataggtagaaggaaaggagaggtctggaaagtcttcaggcatgcacagttctcttcatgtctcctcatgcatcatgcgcacatttagtgggagtttgaaacatggtgaggaaattcaggctgtgacatcagcatgcttggtctgtgcaaactccatttggccatattggtttcaaccaattttggccagttttgtagagggagtttgagcatttcagaaagttatttcttatctgctgttctgtaaattcataatctttgttagttactggtttatttaactctttgggcatgggttcactaccacctgtgctgaccccacttgatcttttgggcctccttacttcccaccttcattctctcatcatactttatatacactaataactcccctgctattctgtatgtaacccaaatatcagctgtactgcctcatctcttagatatctatgtatactctgacctaatcaaaaccagaaattgtggagtgtgaaatgagaaaagcaatagagaggtaacaacagtattgaacaagaagaaggaagaatttgtgaacttgaagataagttatttgaaaatacatgctcagaggagaagaaagaaaaaagaatataaaaaaataaagtcatcaggatgtacaggacagcatcaaaagagccaagttcacattacaggatttcaagaaagaaaggagaaagaaggctatagaaagcttatttaaagaaatagtagccaaaaatgtctatacctgggaaaagagataaatgtctaggtgtaggaagcttaaaggtctcc

SEQ ID NO: 94301 - DNA, 129924 bp, Homo sapiens
  misc_feature (1)...(129924): n = A,T,C or G
catgatatagaaagggcatgagaaatatcagtagattttatgcattgtggtgagtgcaatgacaaaggttaattgagggtagaatgagaaaatgcaagatagtcctccagcttatcctcagagaaggtctgtagatcagaaaatgctttcttgaagctatgacacctgagatgtatcttacagtatgtgtagaaattatgcaagtgaataaaagagaaaaacattgtttgttaagagaaagaacatgtgctaatttctaaattctacagaagtatgacatctcagtgttattgcagaacttcagtatcctaaggaacaaggttttaattggagaaaaaaaggcaattgaggttgctaacatgagaaggagagaccaatttaaaacaatgatatttaattatatccaataaaatacttattccctagctctctagaccaaaaatagcctaaaagtattgaaagcattatagtgataaacactaacagcaccaatttatggtctttaatgaaaatggtgaacatttattaagtacttaatatgtgtcagaccttatattgaatgtttaatatctattaaattatttgaaactccaaatagtcctgtctagtagagttgagaacactcaggttgtgataagtgaaattactgaacaaatcttaagtatatgctgattctcttcctccttttctcttgccatggggcctgagactaataactggcagtccttggatattacatcagagattctgacttcataacatcaaattaagggtcagtgacttatacaatttgtttatgccccaggtatttaccataaggtgttaggaataatagatgttcaatatttattgaacaaatgagtgagtgtaaacttcaaatataaagagatgatggctacatatttttttcttgaacttcaaacgtgcacacacaaatataatcataatgatcattgactcacaaatcataatgtaggttgactaatatccactaattagcaaaatattgaacacaaatgcatcaatttgtctcccaaaagaaatgcactaaatacacaaaactttagaagtcttcactacagttaaaaatatatcatgtttagaggttgttaggtagccacattattattctgaaaattgaaaaatgaaggacaagaatcaaacatttaccccgcttttcttgtacagggtaactaaatagttcatgaagaaagttattctttacaaaaaaaaggggataaccattcttgcaacctttaataaaataccaaatgtaggatatacttatcagtgaaaataaaaccatataaaagtttgctagagaattatgtaattgaaaggacagtctgacatcacttcaagctgctgataaattttaaaaacaaatactgagaaaaccagataatatggtcctctagtatatcaaaataagtattacttaacaatgcctgtgaagtaattgttaagaaaagcaataacaaaattcaacttgtatataataaaatctctagatctaactccctgattgtagaaaatgcaagatattattattgaaaatgtataaaatgatagaaaatacaggataatgagcatgttaaattcatagagataaaagttgttaaccccgaaatgtgagaaatccttagggcaaaaactcagtttcctctaaaaataaattgcatttttttttttttttttttttttttgagacggagtctcgctctgtcgtccaggctggagtgcagtggcgggatctcggctcactgcaagctccgcctcccgggttcacgccattctcctgcctcagcctcccaagtagctgggactacaggcgcccgccactacgcccggctaattttttgtatttttagtagagacggggtttcaccgttttagccgggatggtctcgatctcctgacctcgtgatccgcccgcctcggcctcccaaagtgctgggattacaggcgtgagccaccgcgcccggccgcatttttttttaaaaaaggaaacttataacttaatagaaattgataaaatagatcaaccaaaatgcagtgtatatacctgtttgaatcttgacaaaaatacttttgagataattaaagtaaattaaccataaatttgatacctgatattaaagaattattgttctttttgtttgagatatgtttgtgtaagatacgtggttttgtttttatgttcttaattgttagcaatatataccgaaattagaggtagaatatgctatctgagttttgttttaaaacattccagaatttttaaactagtagaaacaaaacagaaaaatgctggatgttgaaacttggaggtaagtaaatgctagtttattatattattttttactgatttgagcatatttctttccacagtaaatttttttctttaaatggtagctactgatactgagataattatattagttgtatttaataaatggtagctaccattataattgaaaggagggctgagaaacaaagacagaaaatggattcaaactactaccaaataaaagagcaaataccagtgatctgagtgaggaaaatgaggaaaattgaccaggttaacacaagtgagtggctgaataatctatacaaataccagaaatagaggaccagtgattgtggctagttgatactcaaactcaacttatctaaaattgagcctatattcaattcccataaacatttatcctctattgtttcttattttagttaatggcacaagccaaaaacctagcacatagccctaaatcttctttcccttcacttcttactgctcttgaatttatcacctatgtatctctcaaattcattaacttatgcccatctcagagatcattactctagtctaagcaatgtcatgtttgcctggtttacatcaataatatcctaacagtaatctccacatttaatctagctcccaccccacatctgttctcacctcagtagcttgagtgaaaagttttaaattcatgtatcgttacccaaaattttgctacaaagcctttatggactatgagctggtccatacacacaccttcattcttatatcacgcctctaccatattgggggttgcagccaccttaactgtccttaaatcccttgaatataccaacctacttccactttggagactttgcacatgctattctctctgcctggaaagctcacactcctactgttctctctgtcatcaaacagacttctagtgatccctcaagtgtcacttgaaatgtcacttctcccataaaattatccctgactatcccttctcttgtgagactagaaaggcccttctgtcatgttccctaatttctctctttaattttctcttatagcaacctaaaaagtaatttaatccagaaaaaaagttatttaaagtaatgtagttaaaattattatttaaaatcactaaaattaaaatagtattttaagaggcaatatccttcctgatgatagagatttttgttgtgcttaccatcacattcccatctctccccatgtctgcaagtaaatacttgcagagtatttactgaacccctaattctactttatagagcattgcagtaatttcatgtcaggtcatacaataatctcccaaaataggataggaccctttcaaatcccacaactgaagatacctaaagaatgtacatctagagtcaggaagaaagcactctaaatgggatttaatatttaggaacccaagactggcaataagactgaagactacaacacgtgtaggccagaggagacagtggcctatactggggacaaataaagaggtctgtcctatttaagaaaatcaaccctgtaaaggaaattaataggactaagtacattttagtaattcctctaagcaggctctaaagattatgaaaaatagacgggacagcagacacaaaagcccttaaagagcatgatgaagactttctaagttatttcactggaagcctgatagtggggcaagtgtaaggcaaaattcttaattaaattgaacatgataagttgaattctgtcttcgagaacatagaaaagaattatgaaatgccacatgtggttacaagtaatgcagacccaaggctccccagggacaagaagtcttgtgttaatctctttgtggctctgaaagaaagagagagagaaaagattaagcctccttgtggagatcatgtgatgacttcctgattccagccagaggcagcatttccatggaaacttctcttcctcttcacccacacactgctccatgtacctgcaaagcctgttctgtctcaaaaaagttgtttggatgagccgtgacttttttttttcttaaataatgagacaaactccagaaaaagagaaaaaagcagagcagtctgacattccggcatcatcgaaatagtgatggcttttcctagaatgcttcagctaaggacccaaatactaatgatctcctcaaagctttcactttcttttactttttcattaatttcagtggacccccaaactttaagtatggaagaggacaaagaaggaagcttcagaggggcaactttgatttgactactctttttgtcactcttcagctcacaaaagagctcactttagttcaaaacacaaagtctttaagcccctccatagattggtcccaggtttaattttctatgatgtgtggaggcctcagtttaatgctccaacttgatagatgaaacacagttcccacctctacacatttcccctgtctcaggagttgtatatattctcagttgtctgtccaacttatgcccactctttgagatattaatcaaggcactcccttgataacacttgcatattattatcaaaattatgcaattctttctaatatcagcccacaaatacatctcttccattaaaagtttgacttaattatctatactactcatttgaaaactaacatagttaagttgtatttttagccatgaatttcagtttccctagctcactatacacagagaaggaacttttgaaataattgagatgatcaaaaatatttgctgaagaaatatatttctcctttttcattcactcactaattgagaatgtctttgcacaaaacacattgcaaaaacattttcaaaaaaattcctaatttctagaattgataggaaaaacaatatggctacagcattggagagagagagaaaggagagaggagaaaggagagagagagaaaggagagaggagagagacagaggagagagagagaggatagaggggagagagagagaggagagagacagaggagagagagagaggatagaggggagagagagggagagggagagagagggagagagagggagagagagagagagagagggagagagagagagaaagagagagagagggagagagagagagagagctctttaacgtgagatatccccacaatgaagcaaatcgcccagttatcaaagtgagctatccttaggagttgtcagaaaatgcatcaggattatcagagaaaagtatcagaaagatttttttttctgatacgttgtataaaataaacaaactgaaattcaataacatataaggaattctgtctgggctctgaagacaatctctctctgcatattgagttcttcaaacattgtagcctctttatggtctctgagaaataactaccttaaacccataatctttaatacttcctaaactttcttaataagagaagctctattcctgacactacctctcatttgcaaggtcaaatcatcattagttttgtagtctattaactgggtttgcttaggtcaggcattattattactaaccttattgttaatattctaaccataagaattaaactattaatggtgaatagagtttttcactttaacataggcctatcccactggtgggatacgagccaattcgaaagaaaagtcagtcatgtgcttttcagaggatgaaagcttaagataaagactaaaagtgtttgatgctggaggtgggagtggtattatataggtctcagccaagacatgtgataatcactgtagtagtagctggaaagagaaatctgtgactccaattagccagttcctgcagaccttgtgaggactagaggaagaaygctyctggctgttttgtactgcctgctgtggagtttccagacctccgctggccawttcyctagagcctgtgtctcctctaagaacctgatggagaaggaatgctrtccaccrtggagcggggrcaggagtccctgtgrccagctttsaggcakaggttcctrtcagaatatccttytgtccaatgcaccacttgggcctcaatttcccttcacaggggtggatgacyrgkagtcgygrcyttccgtcttttataataggaccygccagtgctctggcaacttcatgrgattcaactgtggaaactgcaagtttggcttttggrgaccaaactgcacagagagaygactcttggtgagaagaaacatcttcgatttgagtgccccagagaaggacaaatkttttgcctacctcactttagcaaagcataccatcagctcagactatgtcatcyccatagggacctatggccaaatgaaaaatggatcaacacccatgtttaacgacatcaatatttatgacctcwttgtctrgatgcattattatgtgtcaatggatgcactgcttgggggatmtgaaatctggagagacattgattttgcccatgaagcamcarcttttctgccttggcatagactcttcttgwtgbrgtgggaacaagaaatccagaagctgacaggagatgaaaacttcactattccatattvggactggcgggatgcagaaaagtgtgacatttgcacagatgagtacatgrgaggtcagyaccccacaaatcctaacttactcagcccarcatcattcttctcctcttggcaggtaagatatgctagatatacgatgtcagagtagggaggaaccttaacaatcacttcttcaggcagggtataaacttctcacctgaacactcattgcagcccccwtcaaggacagaaatggtgccctgttaagaactctcaatgtatcttgtatttttcctttatagcacactttagatatttgtgtaattatttgtttaatgacttctactaggtttctaaactgcaatgaacagagtacttgattcattattgcatttcccagaacatagtatggtgcctttaaaaatggcaatagtgcattatgtattttgtgaattgaataaatgagtgaatgaatgaatatctggatgattaaaaaaacaaatgatatacactaatgtctctgaaaaataaaattattattcacaacaggattcatatggtgtacaaattaaaaatgcaaattcctggccttatcccagactaattggtcagaatcttcaggagagagtcccgagaaggcacaatttactaaatgtctatggtgattcttttaatcaggaatgtttgggaaataattattggattagatcttcatttttgaaagtatgaagatcctgaggcttaaacaggtaaataatgaagatggctaatattcattgaacatctagcatgtgcaaaccccgtggcaagtgtttttgtgcattcgttcatttcatgctcttatcagtctttccctattttagaggttataaaggtatcaggtaacctgtataagatcatacagctaataagcagcaaaaaaaaaatcacatttattctctaatagtccagctgtatgaccactgtatcctatttccaaggatgtgactgctgtgatatctttagctaaaggatctggttcattctgtctcactttttctttaggctgcattagaagttagctttctttctcagtccttgaaaactttagataaaatatgaagcattactatttggaattgaattcctatttcatctattctgaatttttcattctgaattaggggcaaatggtaaccaaagaaatatgtgcttaattatttatcattttaaaaccatatgttaaaggaatgcttttctgcctgtcttccaaaaatttctaatacagcacttttgactagcaatgctctatgaaattaagcccaatatgtgaatgggatgggaagaatcttgcactcaatttcccacaatctgcagttttgaaatgtagatggccttctccgcccaaccaagtttgtaccccatcccaatggagtctactgaagttcatttaaaaaatagccactgtataatttctggtgttattagtcagctatttaccaaatgtaatgggttttgtgcaggaaaggctagaaaaaatgtgcttggaaaaaaatctatttcaataagctttcagacctcctaccttaatctataatgtgcaaactctcatctagctcttatatcctctgttcctgtttaaaaaactgccaggattggacatgggattttcagtcagttatgatgctttatttaactatgtggcttaacttgacccagaaaggttggaggactgtctaaattaccaaaataagctgcaacatccacaggaaatcttaatagatagatacacattaatttttaattacatgagatgtgtaataccagatgctatccacaactgtatgagtattattttcctaattacttattaattgtcragcagaactttttcctttttctctcttcatgaatgtgttcaattttaatactctctagaaaaaaaaaaaagtgtgtcaagtcagtaagccctgaactgaaattgatacaattatcaacttcaaccttgttctatgattaaattgctgtgtagaaacaggtttcaaaaataaaattagaaaacagagtggaaggaagatgactgaagagaaacaagcaaaccacagtttaagaaaggtgaaatgagcatttgctgctcacctactatgttttagtagtgtcaagggcttattagtggcaaaggtgacagtcaaaccccactcacattggctgtttccattccttcacacagcctctctggttacaaagtccttaaaatagttaagatcgattgcttacattgctttaattcagagttctcaatgtcaaaatcacctaggaagcttccaaaaaaccatttaaaaagtaaaaataaaaaactgttgcaaggtttttatgcacctaatttcttgccagaaattcagattcaggtggtctcctgtgaggttgtaaagttcaagagtctttttttttggcagtggtgcaatctccatacgctgcaacttccgcctcccaggttcaagtgattcttctgcctcagtctccctagtagctgggactacaggggcccgccaccactcccagctaattttttgtacttttagtagagatggggtttcaccctgttggccaggctgctcttgaactcttgacytcaagtgatctgtccgcctcagactcccaaagtgctgggattgcaggcctgagccatcaagctgggccttcaagtgtttgcatttttaaaccctcattttgtgattctaatgtgcagccagcactgagaatcattgagttaatggagattgttttggtatctttttactttcactttacaaaaacgcatgttctgtaataaacacaccattaatttgaatgcctttgtccaaattgaatgcttaaattaagaactagactatttgtgtgagatgagatcaaatagtttctagattgagttaagaccttccaaattagctaggctgatgcacctttcacataaagccttctttttttattggtttcagatatcattttacttgaccccaaaattgagatttgagagatttgatagcatttattaactctgagctgagagatcttcaattttatttagggtaacctgtgcattttattaaaaaactatagaaaagcctaaaatggtaggatgattgtccaaagtcacacatctgaggactaaaaccaagcggctctgactgcagtgctttttaagtcaacaatgttatttcttgtttataaggatccatttaggttcagaaggggtcaagtaacccgctaatttctgggtgtataatttgacatttgatcacgttgactcccttaaaattgtcctgccccagacaacataggcagacacagtgatgtagtccttttaatttatatcataatgaaaatattctgagacttttactgatccacctctgttactcaggtagagttgaccctctccccgtctttgtgctatcattgtactttatacagatttgtatcatagcacttgtaacttttcattacatgtagtggttttccagcctgtctgtatctgccagcctgtcagtcgctccaaggtggtgatcatttctaaatatttttgtatccacagagcacaggactataatatacacatggaacaggctttataaatacatgctgaatttaacatcaaagaaacgttagctccaatgctaacatacataaaatattaaactctgcatgggtagatttctaggaccattcactgcagtttttttatagcactggattcccaatgccaaggatacaacaatgtcaacartagccacttactcaaatttgggtataatatatcttgtgtcrttctctctggtagttccatatgtatgtctgcgtgtgtgcatgcaaagaaagacaatacaagagagaagatgaagcaaggtgcaacatagctgagtgtgatttaaatgaagttaatatttattggtcagagttttctgttaaatatgttaaaatcaggtaattaatttatttggaaatattgtgttcctaattcatgtctgttgtttgctcatttatttaactcccaaagctttaaattaggggccatgtttatcatcaattaaaatagttcattatatttggaggtggagggttgcttaataacatttaagtacaaactacccatgctcaatataattagatctaatgttatgcaaccaacagatcagctagctacaaaaataaaaggggtatcaggaataggtgtcatcatgaacagaaacaaagaggaaaaaacatttcctagctgatasacatgagtgaattgtgaccagggaattcactcatcaggtgaaaagcacatcacatggaagcaaagagaagaaaaaaagtcacatttcagcagagagtcatgggttttaggtaaccatgacgacagctcagtgaaataacagcttctcttttttctttatgaaaaagattttgtggaatgtcatacggtttacattttttcccccagataaacctctaatgctataacaaaatctttgctcccaaaagcttttaatatctggcagtttattgctatttctttaaatttaagagaacagtatttaggttcaccttcctcattaatatatctatttcttctatctccccttttttctttgacttggaacacttgatcgtccccccagcatatgttataaatcacttgcgttgaaatagaaaaaaaacagagtcatcatcagaacatccaggctcaaattctacccctgccatttagtagacgacattggaccagttatttaaaatctttgacctttgttttttccaaagagaaaaaaaatgaggtagaattaccatctatacatgttttgtgtgtgtgctaatagraggattaaatggaatgggaaacagaataatgtagtggaaagagtatagtcttttcagtcacatcagcatgaatttgagtgaactttcatacttacttagctacaagaccctaagttacttaattattctgagacgatttttgtccctaaaattagaataatataggttaaagcattactgtgaagggattcaataagatgtgtttatatggcttgtttaggatctgacctattgtttgagtttcatgtgtggaaataatatatttttaaatgatacatcaaagttagatataataatgaatattcaaacagtgttatacacccaaagttaaaaacaatttggtgacctgcccaatggtcttgttttcaaaaataattatgatagttgtcattattaaacactttacacttggcactatgctaagtgctttatacatgttagattatttgatcattgatagaaacgtataattcccatttacagatgaaaaaacttaatacccagagagcttaagtaacttgcccaaggccatgtaactaatagggtcagtattggaaaccaggtctttctgactagaatcttcatgatcataagcacaatgctaatataatttctcctagcctgcctcctctcctgtatgcagtgtaaagactaaggtttggagtttttcaaattatttctggaaccagggtagattttctcctcgttagtaatacctccagtcatccgaacacttagtcacttggcagttggcatttcagcaaaaatagtttcattcaagcctctctaatttaactgagttggctgtaggagtctttaaggcagcaggatcttttgaaaatatcctgagattactcaaagaggaataaaaatgatttagtctacatacttgtagcgtccagttaacccaaattataaaagcatccaacatattacattcaatgtaaaagttaggttagttttattcaaccattcctaagccattaacacgtcataattaatgtagtgggtattgcttcagaataaggaaacttgtgtttcagtgctttggttttgactctaaatatcatatggccctaagacaagtcactcaacagttctagttctcaattatatatggataaaaggatttaggaaygttatgaggtataaggcaaactagaaactggcatttgttgaaacagaaattatttgttgaatagtttcttttcgtatattatgtcatagtacagtttaaaaaaattgagatttagcaagtctaaaaaacatgttcattgccagtaagaaaattagccagaattgaagttgcatctacctgtattacggagcccaattttttctctaccacacaatgcataaattcttaagttatgtcttagtgaccaaaaattaagagtaggttctctaagcatttcttatctaacacagtagcagccayctatggtggggggactgcccattcaattctatttgagatgactacatttgtttatacatgcttatagatagcaaattcagtgggataggaggaccaataaaatagtcttgattattttcaaatgtgatgcaaacagttgaccgggaagacattttaccttcaaattattattctatacgtctcgcctactgttcacaaaattataaatcataacatgggtctttatatcccgttagccttttgtagtcttccacagtctggcttagtatcctcatcatgaaaatagagataaaatcataaaaatccacagggtagttgtgagaatttctaattttaatgtatatggagatatctcccttatggcctaggacagagtagtgactcaatataggtttaaaaaaataagttctagaaatatattctatggtagaggtggtaccaacaacatgaccaagaaaaatgagcactcaacacatactttttgtaggagattctttggctcatccactgactctgttcattcatccaacaaattcttactgcacatcaacagggtgctagaaactgtactagattctgagagaaaagaaataaacaacaatgtraaaataaatgtgtcttcatgaaggatgcgtttttataagggacgtaacaatcattgtttattagagacgaaaatgagtaagtgtaagttgggtaaagaacaatgttatctccctagtggccccaagcctcccacggaagcatgcacctgttgtgaacagtcaatgacggcagggtggactctcctgaatttcatcttttgcttcgaatgtatctctcactacctaattactctattttattaaatctaaggtatcaatgaatttaagtgatgcattcatttatgtaccactaagaaaaataaaaaaatatatttatcttaaaagccctttttggcttacgtagtcacatatttttatcatagtttattcttctgcctmcatataaatgaaactacaagaaaaataatttggtgaagkattcctgaaatgtttttacattcagagtcagccccttttgagttacttttaaagtcagagtcaacaatgcctgtttttactaattatttgctttggccttaaagaatgggtaggatattagatgcatggcaaagagtgggcatgcttagccacaatcagagtcatggaatggagaagcacaagcagtgtccagagaaagtaggccatctgactttagcagcaggatcacacaggatgtgagcacatggagaatggttgcctgactcgagatattttttggaggtagaattgccaatataaaagcagtgccatcrcacaatgctccatgctcagaagcagaccctacatttgaggtttaatgatctgtggtcttggtgttgaaattcttattaatcttatctttgggtttgtgctttataagtgaagttatagggacaatggagcatatgcttggttcatatgcatcctgcagaccttttgttctttgttttcctgggatgggtcttggctaccactacccatccaccagccctacctagtttccacctcctcaccctctgcccaaggccactggtgggaggaaagaggtcaacatttcactgtcactctccatccctggtggggtccttggtgcaagcaaaaagaggtgtgaggttgggtgttgatcccatgatttgttggttcagagtaaaacagaggccttctctaccgaggctggctgcaccttagcacggtgcacaggtgattacatatagacctctcacccagtattatggactgaattgtgtctcccaaaaacgtgtgtgttgaatccctaatttccagtgtgactatttggaggtaggtctttaaggaagtaattgagcttaagtgaggtcattaacagtggggtcctaatccaacagtactcatgtcctcataagaagacaaaaaagacagagccatctctttctttgtgtatgcgtagagaaacggcaatgtgaagacagagaaaaggtttcctctgcaagacataagagaggcctcagcagataccttgatcttggacttccaaactcatgaactttgagaaaataaatgtctgctgtttaagccacccagtctgtagtattttcttatggcagcctgaactaatctacccacctactcaaacaagtcttagcatggaggtttcaatccctagggagtcacctattcactatagactgagactgtgggatacctattccctgtagattgagaaagtgaatattgatttccctacccccagccaaggcctcaacatttatctggtgctgcaaattgcatagccagtcctgcctagagcaccacaatatttacaggtaagacagacgaggaagagctagtaggacacaccaagtagtaacagcaagagagaaaggcaaaaatcaaaggggatgtgattatagaaatcagtacatagaggaatgtgttttgtgaaaatgaaagtggtcaactgtgcctaatgctatcttaacatggggacttgcagggataattggattttataatatggagtctttgaaggttcataacaaactcattggycaagagatgacaggggaagatgactagagtgcctttatgtgggaatgggtagccaggaaatggaattttcatttaagatacttgctaagatttaagctttaaatcatgtagtctatattcaaatattaactccccccgttttataaactataaatgtttgatgaagccacttaacctctataagcctgttttctcattgatgagatggaaatatcaaaagaactcctctcatagaataattgatttactgttattgaatttcaaaccaaagttttcaaatgtctttgtgtcaggcaccataccattacacaataatacatagtgaataggatacagtttatattttgatagagtttatcacctaacaggtatgtttataaagattaaatatatacaccatattgccttattcattgatttaaaaattcatttacaaaaatattagcactttaagtattgagtattttatgtaacttatcttctagtggagtaggtctagtaagtgtgtgtggtgagacagtaaaacattatatataatattttatttaaaaaagttaaaggagttaaaaaatataataagttatatatattgttttactgtctcacccactcacacttcctagacctactccactagaaggtaagttacataaagtactcaatacttaaaatgctaatacttattaaaaatgtttaagtcaatgaataaggcaatatggtatagacattaaatcttcatgaccatacttattagactgtaaactctataaaaataaaaactatgtttatcgtgttcagtatgtattcttgtattctggtataatgcctgacacatagacattttaaaacttcggtttgaaaagcagcaacaataaatcaatyattctatgagagttcttttgattacatagtttgttagaaggtgctaagtgcacagataaagcagaaattagtggtgtacagtaaatgtttaataacttgttctcaatggaggagtgggaaagtagggagagatgattctgatttgccaattgttgtggtgtaaatactgacaatggtagatttccatctaatgatgggatactgctgaacattctaatattgagaagggttacacactttgaacttttgctagctagtgctaaccagctctacaacactgctaaagtgggtaaggctgaatatgatgttaaatagatgtttagtgtagatttcattaagataatgaagatatgaataacccaagcaggtatcaagggaaaacagtctacccagaaaaaataaccagtacaggaacatgttgcataagagtgattggtgagttttgggaagkgcaaagaggccagtgaagttatagaagagagggaaagggaaagatcagtaggaaataatatttgcatcagtctggatctcagtaggaaatagatacccaaaccaagttatattaagacagtttatttagaaaaatttgatcaaggtttagggaaaccaacaaagaacaacatcctgttgtcagccacaactgagatacaggactagaactctctattttattttaacctagaacctacttttaaaaattttttaatgttgagttctgctagactagttataaaagcacaaaatacactaaagatgaagttggaaaacttgggttgccatcacaacactgccatttatttgccatataacctgagaaatgccacttaccctctctgagtctcattttccttatttgtgaagcgaaatgtattgttttgtgatgtaaatgaaacaatgcatgtgccrtgttttcttaaaaagttttgcttatagaaaggtgagaaatwcttatttttaagacggtatttctacaatgaaaatcaccttggttctagctaaaggatcagagaaatttcttttcttaaaaaacaatcaaccacgagtattgtactgcacatcaaaaaaaaaagggacaataataggatattttatgaacaaaaagcacaaaatgaaactatttctagtccttgacattctgaatataatatagaytaatgtttttaaagctactgtttattgagtgttttctgttggtcatgccatgtgctatgggctttatatacagtaagatgcctatctctattgttaccaaccccagcctcagcacttggcacagtgcttaatatataataggtgtttaataaatattttattttctataactatgtgaggtagttgttattatcttcatttgatagatgaggcctagacagttaaatcattttcttaagtggtagatgcaacactagaatcctgttccaggttttaacttttatggctcattctgtaaccttcaaaaagctaattctaaaatacagtagtatgccacacaatggcatttctgtcaaggatggaccacatatatgacagaggtcccacactactataatggagctgaaaaattcctgtcacccagtgacatcatagcagtcataatattatacacaatgcattactcatgtcttcgtggtgatgctggtgtaaacctactgaaatcccacttgtataaaagtctagcacatagcattatgtacactacataatacttgataatgataataaacaactatgttactggtttatgtatttactatctatattttatcattattttcgaatgtacttcttccacttataaaaaagtaagttaactgtaaaacagcctcaggcaggctctccaggaggtgttccacaaaacgcctggatgttttatagagattgttatagagatgatagctccatgtgtactattgcccctgaagattttccagtgggacaagatgtggaggtggaagacaatgatattgacaactttgactctgtgtaggcctatgctagtgtgtatgcttgtgtctcagtttttaacgaaatttcaattatgtttataataagtaaaaaattaaatagcataaagcttataggctaaggatataataaatatttcctacagttgtacaatatgtgttttaagctaagtgctattatcaaaagactcaaaaagttttaaaaaattaagtaaaaaagttacaggaagctaaggtgaatttatcattaaaaaagaaaaatatttttataaatttaatgtagccgatatatatatagtgtttataaaatctactgtagtgtagagtagtatcttaggcctttatattcactccttattccctcacttacttacccaatgcaacttctagtcctgcaaggtccatttatggtaagtgtcctgtatatacaagtatgccatttaaaaaaaaawtttatactgtatttttactgtaccttttacatgtttagataggtttagatgtatagatacttgccattatcttacaattgcctatagtattcagtacagtaatgtgctggacagatttgtagcctaggagcagtaggttttaccaaacagccaagatgtttagtaggctataccattctaggtttgtgcaagtacactgactatgatgttcacgcaatgacaaaatcacctaatgatggatttctcagaacatatccctgtcattaaagacacatgattgtagtaatctcctcaggagaagtctaacaacgataattaggagttccaacatttctgccttctcctactgactcagtggtggtgacaatttgtttaacatgagggtgttttgtacagattgtctgtagccgattggaggagtacaacagccatcagtcttyabgcaatggaacgcccrrgggacctttacggmrtaatcctggaaaccatgacaaatccasaaccccaaggstccsctcttcagctgatgtagaattttgcctgagtttgrcccaatatsaatctggttccatggataaagctgccaatttcagctttagaaatacactggaaggtaatctctttcttttcacttttaatyttttttctgaattcatatttacagtctcttatccaaagtcctaggaggtatttgagaattcagaattttctgagttgaccaagaatatgtgttgtatatacttatatcgacaatgaccctagctgacactggtcagcacgttataattcaacgtgttagcttcaggagccaggcatggtggctcatgcctgtaatcccagtttacttgggaggctgtgacaggtggatcacttgaactcagaagtttcaggctgcagtgagctatgattgtgtcactgcattccagcctcggtaacaaagtgagagactctgaggaaagaagcagcagcagaagcagaagaagcagcagtagcagctttagtgaaatatatgaatatattcatcatggtaataaatacaggcaataggcaacctaatggtgagtaaagtcagttttttccattaaaagagaaaaattaatttcatttccagaacattttgtattgtggaatttcagatataagtctgtggactgatactattttcctacgttttagtgttttagttttctcctgtttaaaatattctaggcagtgggttctttgaggtaagttcattcatttaactgtaataaggacacagcacatagstaaagcctccctctcattatcccttaagttttctgttcttcatcagagattacatctcatgatcttctctaactcctaaatatttctcctacaaatgttttcatcttgcttgcattttgcattcaaacatcgattcattcttttctgcttatagctgactcagtcatgaaacccwtttcactcacataaatttgcattaggaaaacaaaatcacaaacaaacacaacaaaacaaaaacaaacaaaaaaaaactcaatcaagtcacaaatttaccaggagtttggggaagacataggcactgacttgtggcaaggcagacaactcaaaatttaacactagacatcgcagctcctaaaaggcctgtgacaccttaacatgtagaaaaactttcctctcttttgtaatcctttctccttgacttgttctttttttttcctttttgtcattgttttacaccccaacttttattattgtactgtgcagagtggttttactgtttcattcatttccctgttttattcaaaaccataatctcagggtcttacatccagaatcaactgaagcaaggcaagtctcatcctaaagatgaattctgttttccagctatgaaaatagaaattaggtttattcttctatggtaatattcatgattaactttttaaagtaatcaccgtatccaaaacaccatgtcaaacactttgtatggcattaactcactcaattctaataactatcccctgaggaagattgtatttattattcccacttttaagggaggaaacattatcagagatattcatcttttggttattgattcccattgaaaagtggtggagataatctgcccccagctttatcaagtaccaaagtccaagttctttccattgcactctgataatcaacagtgggttgagagtttctttaaagtggacaataccagtttggtcttttgacataagaaggcaagacataatgccaggtaatctcagagcctatataacaaatctaaggtacacaatttcaaagtcaccatctgggaggattgggtgacccactggactcttcagggattaacaacagtactcagaatgctgatattaatgacattgcaaagcgaagctacatctttaaggaaactggagcattttgctgttttttcagccataagtgacaaagcatatattttattattaagaagcatgggttagttgcagaaataaggcaggggaacatcactcrtctagggtctcaagtcaaagaaaaaaagtggctcaagatgtgtcaactcagccagtggttttcaagtgagagtctaatacacacaggtgaggagggaacagcagatttactacaaataatttgctactacaaataatttatgtttgtaaattattttttcccataatttattctcattcttacacactttagtaggcaaagtgtgtgagaagcaaacagatgcaacatagcatattgtctggcacacagtcgttcggtaagtatctgataaccgagtatgtaaataatagctagaatctttcaaattgcatctaaaccaccacttaccttatccatgcctgttgtatgaagtccatgtcatgagagaaaatgtgagaaaccattaagctcagctgctaagaagaacttttctttaccaggtacacattttaaaattattttttcttaaatttgtattcagcaataattttaagcttacagagatgttgtgaaaataaaagcaatacaaaaaacatgaatatatattttacccaaacttacttacattgtatcctgtttctctctctctctctcccagtctgagccattttaagggtaaattgcatagactgtaactctttacccctgaatattttagtgtgtatttcctaagaataggaatagactcatatagccacagaacagttttcaacttcagtaaactctatattgatataatgcttttatcaaatctactgtatatcagtttttaaaattagatataataatatcctcagtawttttcctctccaaaatagaatctagtctaggatcaaatagcatttagttttcatggttctttagtctgaaatatttccataaccttgtacatatgtgtctttatgtgcttgacagctctggaggatatagttcctcctcttcctcctcatttttttaatagaacattcttcattttgagtgtatctaatatttcttcatgactagatccaggtaatgcactattagccaaaattccacrtaggtgattatgcatctttctgagatggtgtcacatctggaggcacatcatgaccatctgtctcacgttggtgatgttaatcacctactccagatgtggtccaattttcccactgtataattatttcttccccttgtttaataaactgtctacatggagacattttaagactatgcaaatacctcacctcttatcacaatttcttctacagttggcatcgtcgatggttacaaatttatgatttttcaacttcagcactgcttttaaatttattagccaatattcaggattctactattagcaaaaatcctccattttttctatctatctatctatctatctatctatctatcatctatctatattaatggtatggagtaaaggctttccattgtttgatagtgtataactcattgatgtgcttaattatctttgtgttccaatggttccagaatttgcccatggtacaccttcaagctggttcttatgtctccatttcatatacacattttttaaaacacacattctctctggtaagcaaattattctagagcatcttgtacctacaatgctccaggcctgaaattagccatgactccaaggagtaatgttttctttcattgggaaggaaaytcaagatcaagattcggaagcaagttttcctcaccagagagacacattttatctcacatcatgaataggacagggatgtggggtgtcttggtctataaggagtacacaagtgaatatagcagtgaggacagtaggacttgagaggagagcaaatgtcaaaattatactctgctctctcaataaatgcatatgaaatggaattgttacttttgattatacctyaaagttattgcttccttttctttcttggtctcgtgwgaagtgtataatgcacttcccatggaacaaaatattcatagtcattgctaggacaaaggaactgttttatttttgtctactgaagttatttaagtaaactcagctttcctcttagatttcattgctgaaatagtgaagatgtgtaatttgtgaattgtgtaagagagaccwcatggccgggtgtggtggctcacgcctgtaaacccagcaatttggaagtccaaggcaggtggatcacctgaggtcaggagcttgagaccagcctggccaacatagagaaaccccgtttctactaaaaatacaaaaattagccaggcatggtggcacatgtctgtaatcccagctacttgggaggctgaggcaggagaatcgcttgaacccaggaggcagaggctgcagtgagcctagatcatgccactgcactccagcctgagtgagactcttyccataaataaataaataaataaataaaaataaaataaaaacctcatgtttctagataaagcaaagaaaartaagtctgtattataagaagttttctgattaggttaaataggggaccctgtgcagtgtcagttgtcacattaaaacagaaattttctctcatgaaactctctatccattatgtcctgtatttcagagtttacaagagattttttgtttactttttcttttatttatttttttaatagcactgttggagaatgggacatggggactgaaatttcaatgaattggttaaaagtaatcaaactgactaggwttacatcctagctcaaccacttcctagatgtgtgaccttgggtatgttatttaacttctcatatgtaaaatgtggataacaataataatgtataagattcaaagaattaaatgatgcaatacatataaggtagttagaacattttttcaacaaagggcacaacagtattgtgttaagctgtggttagttactgacaacttagcaatcattaacttctctggcaattagcttaacaaagtaagtttacagtgagtcctgagaaaatatattataatggcctacatttagtggaaaaataagggaaaggggaggatggaaaattcatgaagatwgaaccaaaaataaataatgtttctggagacagataggatttcaggacaagtttcaaaaatgaggtgacagcaggaacaaaggtatcttctgttacccaaaagggaaaaaggagacaggaacaaggaacaacttcttggygtttaayggtgtgtttccaattctgagcacagtggctgcctatagtaggtgctcattaagtattggctgacagactgataaatcaataaataaaagaaaactaccttcattgtaaaacttacatataccaagaatagtgtaaaatcaaattaatcataggtaggaccaagtcaatcttggttgatcatatattgtttcaaaccacccccttctaacaaatgcagtttatgactatggaaacttactattggaggagacttctcagtatattcagtccgacatcccacactatgctaagatgcccattgggataacaccaccatgtgacccatcaagggaaaacctaccccacaagggaaaacatgaagttctttaggctaaaccaaaatctaattccattcgacttaaatagagccatccatgaacctggtattatggtatactatggaagtacaaaaaaatacaaagatgacttacacagyttatcttactgaaaagctcaccatcaagtgaagaaactccacgtaaatacataaaatggtaattgatataaaatgaggtaggaacccagatacaccagaaatatttcctaaggaggtgaaaatagaattggatcttgaaatatcagtaactgctcactgagcagagaagaggaggagaggcatttccagcagagggaacaacatatgcaatgacacagaggtgtgaaagtgtgagatgagttaccaaaaaatgagaagttctacgtggctagaatattgagtttgtagtgggaaataacaagagatgtaaggagtttagaaaaatccgtgtataccagtgtctctcaatcttcttgaaggaaaaaaacacattataggcctctaggaatatgttcacaaatccctacagaattaagaaactgaagtttattctaagattctttcaaatcttcacttttaaagagttataaattcattcgtaatacattaaatgttagctgtcatcaccataaaaacccaatgtttaaaaaccataacattcttatcttcaaaagtatgtctgaaaaatttgccttgaaaacatgccattgacaagggtagttgtgataggttattaaacaaggaattgatattatcctacctatacttcaaaagatatgatgttagtggcattagtagaatgcagaaagataatcagtgagctattggggggagtcatggatgagagcttgatctaaagtagtgagaatgaggatgaagatgagttggttagtatacagaatcagaagctctcggtgactractgtaaggcagcaaggaaagcaacaagttcaggatgattctgacacatctgtgattgatttctaacaattggtccttgtttttgtcctagtaagctatacgtcattttaaaaatgtaatttctcttcatataacagcacttataaagctgatattatgcttccttctctagaaccttaactttttttctgcagcccttcagctctttttgtttcaatgtcactatcaaacacttcactaggaactatttcaccacttcacatgcaaggactttttaaggagcaatctacagagtggtaaatgagctgtgggctttaatgagaaacaagggaagttttgaaatttttaatgacatttaaacaagaatagtgtgtgtatttgcagagaaaagccagctggaaaactacaatgaagcctccataggtaatctagttttcagtcttcctgcctgagaaatggacttccttagttcatgcaacaacaacaacaaaaaaaaaggtcacacagattcaaaaaataaattcatttgacactaattgtataaactagatagccaaggagatagttaacatggagtgayrcattctagtaattggaaggctaaactatttccctagtatcttcctcactaattctgagggaatcagaaactcagtagtttggtgtaccctgactccgagagaggcagaaggttttgaaagatgattgccagaccaggaaaacctttcygggcctgttttaattaatcccccagatttaccaccttgataaccacattggtattctgatcaggcaataatcctgataataacaataagaattcctatgtgccagacattaatactcctcacatgttatcttatttagtcctcacaacagtcctaggacatttcattgattaaactaaagcaccattctcagcaaagtaattattctaataaatttaggagacagtctctgtccttacattataagctcattccactcattttactcaaaaggtaacttttttctcatatatatatatatatatatttttatactttaagttctagggtacatgtgcacaacatgcaggttkgttacatatgtatacatgtgccatgttggtgtgtgctgcacccattaactcatcatttaccttaggtatatctcctaatgctatcccttccccttacccctaccccatgacaggccccgstgtgtaatgttccccaccctgtgtccaagcgttctcattgttcagttcccacctatgagtgagaacatgcggtgtttggttttttgtccttgtgatagtttgctgagaatgatggtttccagcttcatccatgtccctaaaaaggacatgaactcatccttttttatggctgcatggtattccatggtgtatatgtgccacattttcttaatccagtctatcattgttgtacatttgggttggttccaagtctttgctattgtgaatagtgccgcaataaacataygtgtgcgtctttatagcagcatgatttataatcctttgggtatatacccagtaatgggatggctgagtcaaatggtatttctagttctagatccctgaggaatctagttgtactggcatatgcaatttattgttcatgccaaatatgaatattgacaaagtaaagtgaatttatgtaagccttgtgtcatcttcactctgaattaaaaggtgcaggtattatcttatggcaagtactgtcttaggaagattcactggaaagagagaaagagagaaacttcccagattagtgcagagtcctttagggtcaatgaaaacactgatattgaagacatatagaactggatttcagtatcagttctaaaattctgggcatctacttcctcatttataaaatttcttcaataattacatgctcaggttatcatgagaatttatgtacatctagctcctattacatacacaaaaaatgtttccctttttctcctgccaccttctctgtaatcttcaatagtcttctcaacttctcttataatttagcataggctgtcagtcttcatgatgtgtatttatccaagctaaagagcttttgtttaatttttcatgatttgaactcactgctgtggaaaatggctatttaaaagggataatgtcattttccaagaattcaattgagggtcctagaagatctttatggagcaaaataataatacaccttttctaagtatagagtcaggcattaagacatatagacatttcacttccttgggataagtcttgggaaaaatatcactacacattagcaatacatattgcaaataaaatttataactctattttatgcatttattaaacaaataygagttaaaagacttcaggagttttggtctgtagcccaggctggaatgcaacggtgcaatcttggctcactgaaacctctgcctcccgggttcaaaggattctcaagccacagtctcccgagtatctgggactataggtgtgtgccaccatgcctcgctaatttttttgtatttttagtagagatgggatttctccatattggctgggctggtctcaaactcctgacctcaagagatccaccaccttagcctcccaaaatgctgggattacaggcttgagccaccacacctggcctaacttcaaggtatcaaagacaaattaacaatgtctgatgcatacataggactgctttgtaatcttctacactaatgatttgtastattttggtttcagaatccatttataactcttacaatatatgaaaaatttctgccagcttttatttatgtgggttatatttatgactacttctcatttgtaaaactgaaataaaaagatcttgcatatttgtattaatttatttaaaaaattaatttgttatgtgatagtataaataatataattttaatatttcaaaaatactaagtggaatgagattactttatattttttaaaaacacactacatctgactacttctacattcaatatattataatttattgtttggttgaagaacttgatgaaaatctagcctcacacaactatgtaatcagaatagagagaagtatttttaaaaacattttcagataattgtagatcctttctttttgatactaaaacttcacaaatggtaatttcctcagagtttaattacactgtcaaatctgaaatcatatcaatgaactttttgtccttgctacattaaagtccattgatctgtctagcatcatgaatgagtattttacccattagtgattttataatagcatgcattggtcatttgtaaaatactcagttaagtgatcttccaaatgttaaaatatctcattatacaatattcaaaatcacattattaatatcaccaccaatctcatcagaaatatctttaagtatgaagacattgacaagctcataatgatgtcatcaatttttcttaatttaaatttttgcttgaaaactcaaattgtagcattggcaaaaaagaaaaaataccattagctttttttttctgtttaagtgacagacttgctttgttcacataagaagtctgccaaatgcctgtctaaatagccagtttatctctgaatcctacattcaagtgaaaatgatttcctgtgggaaacatgattatttcagctctcaacacaaataatggcacaaatgttttttccctagacgaacatatttcagaatgcagcataaatagtgcatatgtaggttccattttgtgaaacagaaaattaaaaaggcatgtaaaaaaagatagtttaaaaaattgttttgcttcattatggacattaagtgaaacttgcatttattcatttttactgcaagtctgtggctggtgaagaatataataattacagtacacttggttgccactaccttgatttgtgctaagacaccagaagatttgcccaccattgcttttgcaccatcagtgcaaatgtgaacacagaaaaaggcaaaatcacatcatagtatcattaggaaaatagttttgacattgcaaatcctctgaaagagtttcagggacttcaaggggtctgttggccccattttgttaagcaataaaatattgggattgtagaataatttcttttttaaaaataagggcrtctgggaagaccttattaatttcaaatacaattctgcattttcaggatgaaatgtcaaagaatkttgatatctaaaggcacatttgcgaaatccaaaaagacatggtggctaacaacgtacattatcaggcctttcctctagagattttggttcagtaggtctggcagtggaagtgggggtgtttatgacctccagtgagccacagtgacttatataataatgttatatatatatgtgtgtgtggagatatagatatatcacataattatttgtatttatatattaaaccttattatcaatacaaagagcacacacccacacacttatttttgtgggggcagggtaaaaggtgttttcctgcaatggtacattagtcaccttgcttctctctctggtggctgttgaggttgtctacagtggattgggtgcatcctgagggccctcaacagaatgaggtccacacacaaccttctagtatttggaaagttgagggacagcatgaaaattgcacagtaaaagcacacactgttgagctatgaaaatgaagcagttttttttttatagtaaatagtaggtcattgtgtttcccaaacgtgatctaattggctattacaaattatctggcacatatattgattccagatgtgattagtgttcacttggttttagggttttacatatacgccaatttggcagtcctaacgtgttgatgttgataatgtttcatggccaaaactagaatatattttcataatacacacacacacacacacacacacacacacacacacacacacamtstatagctggatcctaggaaactttaattttagtaaatgcctcagatgatttttatgatcaggcatacagggcagctctgctctatagctggttactatattcacatttcttttcttaagaygtaataattaatggagggggagcagattttataatcaactgtagaaatatggttataaaaactcgytatttcatggcttatacttctcttcattgcaagctcctcttacctcaaggacagaaaaaaatgatgctgtttctatgaaaagatttttctgtttagtaaaatctctagtgtaaaaggagtggcctrttttcaatttgcaagtctgatcattagcctttgattcatataacataaatagacttctttgatatctaaaaagcttggctatattaaagtaagaaagtaatagatacttgcatttccacattacaagtgagcaacagagaaaacaaaattagtacttgttgagcacctgataccttgtacattttcaaataaatcacttgaaatttgcaattacaccatgagacaggttttcccttgattttacggatagggaacctgatagtcacatggttgataacaaccatagttaagtctactattccaaattcatctgactccaaggctgatacaaattccacttcactacaaagccttcttcagcctgctaaagtaaagctgaggactctgataaactcccaaccctgcctctggtatatgacccaacactaaccactctgctcagagtaggtatctaaaagaaattcttgtgtgaaacaatgaaattttggtgggaaaacagaaacatgattgtcaataacaaaagtatacaacacagacttctacttctgggaaggtaaagtaggtacacttttctctattagtccctctaaatacaaccacaatctctggacatggcatataaaagaaacagaaagaatgtaaatagtgaagagaagaagccaggtcagctaggaatattgggatctcacggtatgatggtgagtcccctgggttttattttcctcatatattcaagatttggagctgaagaagcttgtaacctagaaacacccagaggtacaaacaaaagtaaaacaaaacaaaacagaaagaaaaaaacaccaacaaaagccttctctctctagtcaaatgacaaagaaaggtgcagaaaagttttaaacagtaactactctatttcattcaaattcaaaaacagaaaaactgaggcacaatccccacccaagtcagcaaaagttgactggggagactagacttctacccttactaggctataacaaggtgcctcctcaattcccttccagggtgatgtaagagaaggctcagtttgcattccaaccagggaggaattaaccactcttcctactttacatggaggcaatgtggaggacctgcaattctatccccaccaggcagtaaaaagaggaatcctttcttcccttctggattgttgtcagaggaggcctactggatagttaggtcttctagcactgtctagtggtaattaggccacccaatccatggcattaggggaaagtagttgaggagcagtaatgaggggtattcttacctctcctagcaaggaagacatcagtagaggcctagtggggagccaggtcggtggggaacttggacttctattgctacttaaaagtaataatgcagtgtttcccttctgctggagctgagtcagagaaagccaggagattatacatttttttttttttgagatggagtctttgctgtgttgyccaggctggtgtaaagtagcgtgatctcagcccactgcaacctccacctcccagagtagctgggattcccctgcctcagtttcccgagtagctcagattgcaggtgcccaccaacaagcccggctaatttttttwatatttttagtagagacaggatttcactatgttggtctggctagctcccaactcctagcttcaagtgatccacccactttggcctcccaaagtactgggattacaggtgtgagccactgcgcccagctgagattataaacttttataaaacagaagatttaataagatctgtagtctcataaaatacccaaaatgtccaggttgaaaacagaaaataatcccttatcatactaagaaaagttacatccttgaattaaaaaaaaaaaaaagacagcagacgttaacactgaagtaacagatatgttaaaattatctcaaataataggttgaagcaaaagtaattgtggtttttgccattgaacagaatggtgaaaaccgcaattacgtttgtaccaagttaatagatttaaaacactcatttttgaattcctcaatgaataattataaacatagttgaaacaaatgaaaaaaatagaatgacttcgcaagaaaatggaagatatcacaaagaacaaaacaaaattagaactaaaaaatacagttaccaaagtaamagtctcaatactaggttcaacagcagaatggagaggaaagaagaaagaataagtgaactggaagatagaaaaatagaaattaccaaatctgaaaaacagaaaacacactggaaaaaaaattaaaaaggctcaaagagttgaataactacatgaaaatgattgaacttttgtgttattagygtcctagaaagaggggagaaaaatcagttctaagaactcaatgaaatagtgactgaaaacttcccaaatttagcaaaagaaactacaaattaaagaatcwgagttaaacccaatttaataaatcccatagcaatccacatcaaaatatatcactattaaacttctaaaaactaaaacaaatattcaaagtagtgagaaattaattatatcttatctattgtggaaaaaaatgaatgacagatctttcctttgacactatggaggccagaaggtggcactgcatttttcaaatgctgaaaaaaatgaactgttaacccagtgttctatgcccagggaaaatactcaggaatgaaggagaactcaaggtctcctcagatgaagtaaaatgaaaagattttgtcaccaccaagcagacctgccctgaaaaaaaaatggttaatagaagtttcttaagaagaaggcaaatgataaaataaactttcttaagcaaaaatatagggaattcaacagacttctgttgagttttctaaattgtgrtttaatggttgaaacaaaaataaaattttatgtcattcatctaaatgaacataagataaatatttaagacaaataaggttttacacttaatttgaactagttgaaggatgatgccagcagagataaattatgtaaaaataatgtaatacttagataaatcaccaataaagtgatacaaagaaatacattcaaaaaacttgataaataaaaatggaatttgtaaacattttcaagcaactcaaatgaagacaggaaaaatgaaccaaaaaattcagaaaagtaacaaacaggaaaaaaataggtttaagccataacattatataatacttatattaaatgtgaatagtctaaaaataccaattaagagattgggagactagattttatttaaaaatgacctatattgagcctagaggaaattcactttagatataacaatatttgtgaaagttaaaggatggaaaaaatcataaaacattaatcaaaacaaagttaaagtggctatattaatatctaataaaatagacttcagagcaaaaacaattattggagtaagagaggcacattttatcaagattaatgagtcaatccagtaagaagacatcacaatcctaaatgtgtatgcaccaaacaagcttaaaatttgtgaagcaaaagctggtagagctaaaaggaakaaatagacaaattcacaattacagttggagaattcaatactgctgtttaaccaacaggactaggcaaaacatctgcagtgataaagaacttaacaccatcagccagaagaatctaatcaacattgatagaacattccattcaataacaacaacaaaaaatatttatttgaagtgctgataaaacatatgctaaacatatgactgccccttgagccataaagcaaatatcaacaaatttaaaaagattggaattatacagactgtgttctcctaccccaatggaatcaaactagaaatcaataacatgagggaaagatcttcaaacacttagaaactaaacaaagcacttctaaataacccaaggagtaaagagaaagacttaaggaaaataaaatacatttaaataaataaaattaaaaaccaaacttaccaaaatttgtcagacatactataaaattgtgctgagagggggaagtatagtactaaatgcacacatgtggaaagaggtaaagtctcaagtcagtaatacaaactcaaactmcagaacctagaaatagaagagcaaaataaaaccaaagcacagagaatgaaggaaataataaagataggagcagaaagcagtgaaattaaaaacaggaatcaatacaggatatgaatataacaagcagctggtttttgggaaatattaataaaattgacgaattagcaagattgaaaagggaaaaagagaaaagacacaaattaccaatatcaagaatcaaaaaagggatatcamtacagatcttgcagacatcaaaagggtaataaaagcgtactatgagcactctatgtacataacatttgacaacttagatgaaatgaactaattcctaaaaaagcgcaaactataccactcacccaataagaaatagacaacttgaatagccctataaatgtaaaggaaattgaattggtaattttaaaactaccaaaatagaaatcctaaggaatagaatgttttccttgagaatcaaccaggaatttaacaaattaacataaattctatacaatctgttccagaatgtagaagggaacatttctgagtcattttataaatccagtatyaccttaatattgaaaccagataaaaggatgccaagaaaatgagacagatcaatatccctcatgtacatatatgtaaaaattcttaaaatattgacgaatataattcagctgcatataaaaagaattttatgcattgaaacaaatgaaatttattccaaaaataccaaactgcttcaatatgtaaatattctgtatcttgaccctttcaataccaatatcctagctgtgatattctactatattacataatattttttcaaggttaccattgagggaaattgaataaggagcacatcagatttctctctattatttcttacagctgcatataattctataattaactcaaaataaaaagtttttaaggccaggggcggtggctcacgcctgtaatcccagcactttgggaggccaaggcggggggatcacgaagtcaggagatcaagaccatcctggctaacacagtgaaatcccrtctctactaaaaatacaaaaaaaattagccagatgtggtggcgggcacctgtagtactagctactcgggaggctgaggcaggagaatggtgtgaatccaggaggcggagcctgcagtgagtggagatcgcgccatggcactccagcctgggcaacagagcaagactccgtctcaagaaaagaaaaaaagtttttaaaaagacaaagttctttaaggcaaatatttgaaatttacatttaaatagatagatgagataaaagacgtattaggaaccctatttcagtcaagcaaggagcaatacttacttttatttattgacctttcttgatgcataaacatcaagagaaccaatgtgtaacatcatccaagataatatcaacagttatcaatatatgtgagaaaagacttagggaggacttccaatatatattttattctaaattttacattatacaaacagctattatcactttgttttctgccaatttgagatgaataattattgtgccagagaataaaataattgctcagtgagtatgcaattcatctgaatctatggatcatttacagasaatctccttaaaatatgcatcataattttaatcactaacatatacccaaatccctaattttgtaagtacttctaaaacatatctaatgatctttgtaatcattcttcttagacrtatttactttgtttttatttatccaccagcattagcaattgcttatttttgttgcttactttataaaraaagattttccatatcaatcaatttttatggccactatttatgttattgtaaagtaagaacaaaggtaagaccttttgctcaactttcagttgagtttaaatccttgctttgggagagcttccaagatgactgaacaggaagagctctggtctacatctcccagggagatcaatgcagaagatgggtgatttctgcatttccaactgaggtatctgattcatctcattgggactggtcggacagtgggtgcagcccacagaaggtgaaccaaagcaggatggggggtcacctcayctgggaagcacaaggggttgggggatttccctttcctagcccaaggaagctgtgagtgactgtacctggaggaacagtacactcttgcccaaatactatgtttttcccatgctctttgcaaccagcagaccaggagattccctcccatgcctggctcagcaggtcctgtgcccacagagccttgttcactgctagtgcagcagtctgagatagacctggcatgctggagcttggcagggagaggggcatccaccattgctgaggcttgagtaggcgattctatgctcacagtgtaaacaaagcagcagggaaactagaactgggtggagcccactgcagctcagcaaggcctactgcctctttagattccacctctgggggcagggcatatctgaacaaaaggcatcagacagcttatgcagaattaaacgtccttgtctgacagctctgaagagagcagtggctcttggagcacagcgttcgagctccrataatggacagacggcctcctcaagtgggtccctgaccccgtgtagcctgactgggagacactacccagtagaggccgacagctgcctcatacaggcaggtgcccctctgggacgaagcttccagaggaaggatcgggcagcaatatttgctgttctgcaggctccattggtgatacccaggcaaacagggtctggagcggacctcaagcaaactccaacagacctgcagctcaggggcctgtctgttacaaggaaaactaactaacagaaaggaataccatcaacatcaaacaaacaggacatccaaagcaaaaccccatttttaggtcacatacatcaaagaccaaaggtagataaaaccacaaagatggggagaaaccagagtagaaagactgaaaattccaaaaaccagaatgcctcttctcctccaaaggaacacagctcctcatcagcaaggcaacaaaactggatggagaatgagtttgacaagttgactgaagtaggcttcagaaggtgggtaataacaaacatctccgagctaaaaggggatgtttaaacccatcgcaagaaagctaaaaactttgaaaaaaggttagatgaatggctaactagaataaccagtgtagagaagagcttaaatgacctgctggagctgaaaaccacagtacgagaacttcatgaaacatatgcaagcttcaatagcagattcaatcaagaggaagaaaggatatcagtgatcgaagatcaaattaatgaaataaagtaagaagacaagattagagaaaaaagaatgaaaagaaacaaagcctccaataaatatgggactatttgaaaagaccaaacctacatttgattcgtgtacctgaaagtgatgacgagaatgaccaagttacaaaacactcttcaggatattatccaggagaacttccccaacctagcaaggcaggccaacattcaaattcaggaaatacagagaacaccataaagatactcctcgagaagagcaaccccaagacacataattgtcagattcaccaaggttgaaatgaaggaaaaagtgttaaaggcagccagagagaaaggttgggttacccacaaagggaagcccatcagactaacagcagatctctcagcagaaaccctataagccataggagagtgggggtcaatattcaacattcttaaataattttcaacccagaatttcatattcagctacactaagattcctaagtgaaggagaaataaaatcctttacagacaagcaaatgctgagagattttgtcaccatcaggcctgccttacaagaactcctgaaggaagcactaaacatgaaaaggaacaacgggtaccagacactgcaaaaacacaccaaattgtaaagaccatcaatgctatgaagaaactgcatcaattaatgggcaaaataaccagttagcatcataatggcaggatcaaattcacatataacaatattaaccttaaatgtaaatggagtaaatgccccaattaaaagacacagactggcaaattggatagtcaagacccatcgatgtgctatattcaggagacccatctcacgtgcaaagacacacataggctcaaaataaagggactgaagaagatctaccaagcaaatggaaaacaaaacaaaagaaaaaagcaggggttgcaatcctggtctttaaactaacaaaaatcaaaagaaaaaaagaaggccattacataatggtaatgggatcaattcaacaagaagagctaactgtcctaaatatacgtgcacccaatataggagcacctagattcataaagcaagttcttagagacctacaaagagagttagactcccatacaataatagtgggagactttaacaccccactgtcaatattagacagatcaatgagacagaaaattagcaaggttatccgggaattgaactcrgctctggaccaaatggacctaatagacatctacagaactctccaccccaaatcaacagaatatacgttcttctcggcaccacatcacactgtaaaattgaccacataattggaagtaaaacactccacagcaaatgtaaaagaacagaatcacaacaaactgtctctcagaccacagtgcaatcaagttagaactcaggattaagaaattcactcaaaaccacacaactacatggaaactgaacaacctgctcctaaatgactgctgggtaaataacaaaatgaaggcagaaataaagttgttctttaaaaccaattataacaaagacacgacgtaccagaatctctgggacacatttaaagcagcrtgtcgggagaaatttatagcactaaatgcccacaagagaaagcaggaaatatctaaaattgacaccctgacatcacaagtaaaagaagtagagaagcaagagcaaacacatttaaaagctagcagaagaaataactaagatcagagcagaaatgaaggagacagagacaagaaaatcccttcaaaaaaatcaatgaatccacgagctgtttttttgaaaagatcaacaaaatagatagaacattagcaagactaataaaagagagaagaatcaaatatatgcaataagaaatgataaagaggatattgccactgatcccccagaaatacaaactaccatcagagaatactataaacacctctatgcaaataatctagaaaatctagaagaaatggataaattcctcaacacatacaccctcccaagactaaaccaggaagaagttgaatctctgaatagaccaataayaggtgctgaaattgaggcaataattaatagcctaccaactaaaaaaagtccaggatcagatggattcacagccgaattccaccagaggtacaaagaggagctggtaccattccttctgaaaatattccaatcaatagaaaaacagggaatccttcttaattcattttatgaggccagcatcatcctcataccaaagcctggcagagatacaaccgaaaaaggagaattttaggccaatatccctgatgaacatcgatgcgaaaatcctcaataaaatactggcaaactgagtccaacagcacatcaaaaagcttatccaccacaatcaagttgrcttcatccccgggatgcaaggctggttcaacatacacaaatcaataaatgtaaatccatcacataaacagaaccaaccacaaaaaccacttgattatctccatagatgcagaaaaggccttcaacaaaattcaacagcttttcatgctaaaaactctcagtaaactaggtattgatggaacgtatctcaaaataataagaggtatttatgacaaacccgcagccaatattatactgaatgggcaaaaactggaagcattccctttgaaatccagcacaagacaaggatgccctctctcaccactcctattcacatagtattggaagttctggccaggacaatcaggcaagagaaagaaaaaaaggatattgaaataggaagggaggaagtccaattgtctatttgcagatgatatgattgtatatttagaaaaccccattgtctcagcccaaaatctccttaagctgataagcaacttcagaaaagtctcaggatacaaaatcaatgtgcaaaaatcacaagcattcctatataccaataatagacaaaaagagagccaaatcatgagtgaactcccattcataattactataaagagaataaaatacctaggaatccaacttacaagggatgttaaggacctcttcaaagaggactacaaaccatggttcaaggaaataaaagaggacacaaacaaatggaagaagattcaatgctcatggataggaagaatcaatattgtgaaaatggtcatactgcccaaaataatttacagatccaatgctatccccatcaggctactactgactttcttcacagaaytggaaaaaactactttaaagatcatatggaaccaaaaagagcctgcatatccaagacaattaattctaagcaaaaaagatcaaagctggaggcatcatgctacctgacttcaagctatactacaaggctacactaaccaaaacagcatgacactggtaccaaaacagatatatagactaatggaacagaacagaggcctcagaaataacaccacacatctacaaacaacagatctttcacaaacctgacaaaaacaagtaatggagaaaggattccctatttaataaatggtgttgggaaaactggctagccatatgtagaaawctgaaactggatcccttccttacaccttacacaaaaattaactcaatatggattaaagacttaaatgttagacctaaaaccataaaaaccctggaagaaaacctaggcaataccgttgagaacacaggcaaagacttcatgactaaaacaccaaaagcaatggcaacaaaagccaaaattgacaaatgagatccaattaaactatagatggttctgccagcaaaagaaatatcagagtgaacaggcaacctacagaactggagaaaatttttgccatccatcaaactgacaaagggctaatgtccatcaaaaagtggacaaaggatatgaacagacacttctcaaaataagacatttatgcagcaaatagacatatgaaaaaatcctcatcatccctggtcatcagagaaatgcaaatcaaaaccacaatgccataccatctcatgcctgttagaatggcgatcattaaaaggtcaggaaacaacagatgctagagaggatgtagagaaataggaacccttttacactgctggtgggagtgtaaattagttcaaccattgtggaagagagtgtgacgattcctcaaggatctagaactagaaataccatttcacccagcgatcccattactgggtatacccaaaggattatatatcatgctattgtaaagacacatgcacgtgtatgtttattgcgraactatttacaatagcaaagacttggaaccaacccaaatgtccatcaataatggacaggataaagcaaatatggcacatatacaccatggaatactatgcagccataaaaaatggatgaactcacaggtcagacccactgaaatagcaccaaatatcagakccaagggatgaacagagctctaaagtaaatcaaaagcccagaaatcaggagactaagaggcagtaaatcatgtgattaagawcatagattttagcatcaaacatgcctcattttgaatcccaaagctgctacatctagctacataatctttggcaagctgcttattcttccctaagccttctttttctcaccataaaatggtgctaatatttgtagccatctaaagttacagctttgatttttagtacgatattgtaaaaatatatatgtaacaacgttcttagcacacaattactagatagacaaggaacttgctattaaaatatttgcattctagtgaggagaagcataagcaaaccagaaaagaaataagcacaaaattcagttaagcactatgatgtgatataatatctatatattttataaagaattacttgggagaagcttgcagttgagataggctacttatagctgacttctctgatgaagctgaaaaccatcattctcagcaaaatatcacaaggacacaaaaccaatcaccgtatgttctcactcataagtgggagttaaacaatgagaacacatggacacaggatggggaacatccctgtttgggggtggggggctgggggagggatagtgttaggagaaatatctaatttaaataacgagctgatgggtgcagcacaccaacacrgcacatgtacacctatgtaacaaacctgctcattgtgtacatctaccctagaacttaaagtataataatagtaataaaataaaataaaaattattgctttggcaaagaataaatggctatatcccattggctttaaaaatttgagtctaagcaatccattaaaataatctattttaacttaaaattttttatagatttaggggtacaatcatgattgtgttgcacagatatattgcacagtggtgaagtctgggctttgagtgcacctgtcaatcaaatagtgttcatagtgttactaagaaatgtttagaaatgtcataagaatcccaccatttttggagagagatcattaatactaaagacgcaagaccctccataagtcatttaacttcatacagctcatgttttttatttataaggtgaagataatatttctgttctatctgtttatgtaattatcaactaagataatgtttgttaaayatagaaaacctctgttactatattattataatgaagaaaataatttttaggatttatacaacatactaggattttggtatctttaatcaataattttaattgaaaccatatttatttttctttttcatcctgcagtaaattcagattttgtgcagtgagtgacttcacttaccaatagaaggtgtgaaagcttatgaacctggtgaaagcttatgaacctggaattgtgactttagtgtataaataaacagaagaaaatgcagtaagaaaaagcatcagatttataggtgaaatacttaaaggatggcacttaaacagagtaagaaatatgacttgtatgtatactaaaagcaactgtggctcagattattccttctgaggttctatctgccattcatttcatggaatattgtggaattagcctatttcaccttctattaaatgrggcccactttatggtatcataagaaaactcaaggctgaggtgcactgattgcctcagctctggagtttgacacgagcccaggcaacatggtgaaaccccatctctactaaaaatacaaaaaattagccaggcatggtgatgcacccctgtagtctcagctactcagtaggctgaggctgsagaatcgcttgaacccaggaggcagaggtcgcagtgagccgagatcgcaccactgcactccagcctggatggagtttttccatctcaaaaaaaaaaaaaaaaaaaaaataggtaaacccaaataatatgccttttaagaaaaagaagttgattttgctcttatgaaacaatatgaagttagatcttcaagatctggtagtgcaattctgtcatccttaactcacagcttccatctcttgatcttcatcctgttttcaccctaatcgaaagggtgaaagtgggaagaatagcgtatgactatttttctttaaaggaattatttagaagtgtttcttatcatgatcaaacagacatggtaacatttagcttaaactggaagatgttatctccagctagtggccatgtgtccaacaacatttagattattattaggaaaaagagaaaaaattagcatttgtgaaaaaagtagtagtctctgtcacaatcttttacccatgttttgtaaagtatttaaaacaaaaatcaagcactcttaccataatgttctgtcacagtgttgttttaaatttcatgtaaaacaacattagttctgtagtggtaaatgaagtgttaaagtctctctttaactccagacctttcaagttattaaaaatgcgaacatttattatctaacttaggaagtagagaatattggagtaagtaatactatgcagtgttaacaaacgtatgccaaaatcttagtgatgtaatccaataaaaatgaatttcttgctcatccaaaatccaatttggatgtttctggttggggaatgaccttccctatggctatgttagtgagtctactgtcccccacttatctgatgtatcttctccatcttcctgggagactgagtatgaggatgcatggagaattgtacatgagaaatatatgggccaagccttgaagtggcccacataccttctgcctacatgtcattgaccactacttattcacagggccacatataaatgtgaggttcattgtgcatccaggagttaagggaaagtggttttttgaacacagtgaatggatgtgtcttgggtgtttctgtttgagtctcttcgttgttttatttttccctctaggatccagtaattcctgaactttagttctggcctgggctggcctgcctcattttcactgaagcctcgattcttaactgtgaaagaatagataattttctctttcttaccattgcttgctgccctactctttctgaaatagtttcccatgttatcccattttctactacatggaaaaagatcatgctattctgttttccataatcattatatattcttttttccccatggtatttcccaaaaatttattattccatgttttatgggtgaatagttatttctattaactacttttttagagtgaagaatcatcgacctcttctatcctaacatctactgttatcccctccatgctgaacaacaccaaaactatttttcatgtaggttgttcagggctttctctctattcacttaattattccatcaggagactattgagagaggcctataacataaaaacataagggttaaattcaaagcyatcgtcaatcttactcaaagacataaaccttagaacattataggaatcttcaaaaaagttagcttaattgattttaaaattatgccagcaactaaagctacatgttttagaaagagaaatatatgcctcatgtttattgattaaaaaacatttatagatactttgcaatatactaggaataaatgacatattctgccctcttgaaacttaatataattaagaactagattgtgaaaaactaattataatccaaagaaaataaatgattaaaagaggcaaatttaagtgtcattaaatgaaggaagctaaccaaatatttcttgtcaaagaaatttttatggatgatctgatatcaccaagaatgagctggaatagtttcagtaaagtacaaagaagaaaaggaggaaaattgacaaattctttcctacatctttacaaaataaccttacaaattaccagatagcctctgtaattaataacaacagttaacatcactacaatcctacttttctaaaaacttttcacgtccattatcttaattattcttcttaaatgccttataccatatttattattatgcacactttataaatgaggaaactgagattctgataatttatccaattgacaatgttacagagctaacaggtagaaaacatggatcattagcaagggagatcatgtcctcaagtgttccaaatagaaaagccaagttttagatgcagctagagaaaagcagttaagagttggactacctgggtttaaattctagtactatcacttactagttaaatgacttttgtaaatttaacctgcccttgcctgaggtccctcacttacaaagtgataataatcacaatacctacctcatatgctattgtgaagattacataagtcagtatttgtaaattacttagaacyatccttttattgcaataatgaaagttccttaaagttactgtcttgcatgctgatgcacacactgtaattttctagccctatatagaagccaaattccaaacaatagactaggacttgagactcaaactggacaaaaattgtttcaggaaaatattagtcctaaatyaaacttatatccaaagtgtaaagagcagcagaatgayagagtgactttttttttttttttttggagacagagtcccactctattgcccaggctggagtgcagtggagcgatcttggctctctgcaacctgtgtctcccaggttcaaacgattctcctgcctcagcctctcgagtagctgggactacagacatgcaccatcacccctggctaatttttgtatttttagtagagacaccatgttggccaggctggttttgaacccctaatgtcaagtgatccacctgtctcggcctcccaaagtgctaggagtacaggcgtgacccactgtgcccggcctgatagaatgcttttaaaagcaacctttaggatgaaattatgtccttccacaaattcttacaatctagtaaaaaaattaaatttgataagaacaaaaattggccataagtatgtgggtattgggtcttatacaatatcttggtgacactaccaaaaattyttgccttctctgatccagttgactatgtgccctggagtcctgtgataggaagctgatgaagttttcatccagagagtaagaaccagcatgatagggccttttctaccccaagagagtactctgtgaaaaagctgggttgcagctttttattccaatggatatgacaagaattaaaggaaataaaggaactatcataactgcaacagaacatctattgtctattttaaattttattgcaactaatggctttatatcaactgaaagaatgtaacagaataattaagagcaaagcttggaagtttggcagataattggccaaaattctgaccctgccacttatctgcttgtggtaggccgttctcacattgctttaaagaaatctcagactrggtaattaaaaaaaaaatggttttatttactcacagttctgtaggccgtacaggaagcacagtgctgacatctgcctggcttctggggaggctgaaacttacaattatggtagaaggcagagagcacgcacattatatcgccagagcaggagccagcgtgaagggtagcaggtgccacacacttttaaatcatcagatcttgcgagaactcactcactattgtgagaacagcaccaaacggatggtactaaactattcatgagaaatttgccccatgatcaaatcaccttccaccaggtcccacctccaaaagtggggattacatttcaacatgacatttgggctaggacacatatccaaactatatcattactgaatgaccttagataaaccacctatcctctttgagacttagtttcaacacctgaaagttggttaaataatatcttctttacagagttactacgaagatagccgggcgtggcgggtgcctgtaatcccagctactcagaasgctgaggcagaaaaatcgcttgaaccygggaggcggaggttgcagtgagcggagatcacaccactgcactccagcgcctgggcaacaagagcgaaactccgtctcaaaaaaacaaaactcaaaacaaaacaaaacaaaacaaaaacagagttgctatgaagatgaagttctataaaaacttaaggaaatgcagcctagcacctaccacataggaatagaaggtgtagtaatagcagtaatctttgttgtagagaggcaattaagtagtagagaagagaaaacacaaacaccgaggttaacaagtagagaagcccacttaaaataataaacactttaataacacaaaaacctttcttgaatttatggaaatgacttatmattcattgtgatttgtcattgtctttgtgcaaacaatgaaaagaatgagagcagctgttttcaaaccttatttgcattagaatcacctgtagaactggttaacacacacgatgggtccccacctgactttctgttcagtgaytcactgttagggttagaggatttgtgtttgtaacaagtttacaggtgatgctgctaactctgggaccacatttttgaaaaacacaaaatatgtggagtgtttgtgccctgggctctgctgtaataattacatagtatgaaacactcatgcaccacttcatttgcttcgttactctattcctcataatcaaagaaatctcctgagtcaaattaaaagtattttctaataaacataaatgctaattaattacatttatggctgtagagctagcactttgagcaaactggaagttggttgaaagttaatgcttctcgtgtatctagggacttgcttagatccaaaaatgttttttgatctgcaattctgtatttcttctgtaagtagtttaaattacaagccttttcaaagtattcagccatcaaatacagcctcctaaaaccattgtgcataaccttttgaagctgtgtacttaattcctcaatcaagttgcacattaggagagtaaattggaggaatataagtcagtgggtcttaagtcactttttaaaaaatcttcagatgcactaatgtacattttctatcttctttttatttcctcttctccaattccatctctgaaacactatgaaatgttaaaataggttaaaaatgcacttaaatgaaatkcaataaattaaatgtgctctattcttctgaagatttaactacacaccttttcatatttcagactcttagcaggtatgattaaagtgcaacatctgtaactcatcttcctcaaaggaaagatacggaattatatgagatgatwtatgtgccaatgcctagccagtgactgttacatagtagttgctcaatttcttaaatcataattttcaaaggaacatggaacagttaycaggaagaaaatatgtcaaggcataagtttatagtgtaagattttaaaggcagaaggatttttggactgtcagaatatagaaggtgaaaatttcatatcaaggaaatcatatattcacaggtagtttttgaagcatgagctcaggtttagagaatggagatcagtccagcttaattcagtgcagtgcaaccctggtcacatgttagaacgacccggagtggttttcaaactccaagtgcctgagtcccattctaaaccagttatatctgaatctctaggtatgagagctaagcatcaatattaaaaagaaacaaacataaacttttcagagtagtattagggaagaaaagagcaaaagagatcaactagttgcaattttctattgttgggtgccgggcacggtgtctcacgcctgtaatcccagcactttgggaggccagggcaggtggatcacctgaggtcagtagtttgagattagtgtggccaacatggggaatccccacctctacgaaaaatacaaaaattagccaggcatgctggcttgtgcctgtaatcccagctactctggagtctgaggcaggagaatcacttgaacccaggaggtggaggttgcagaaagctgagatcacaccactgcactccagcctgggcaacagagtgagactccatcttaaaaaaaaaaaattctattgttgccattgacctgaaactgggtttattaatttcctataggaatgtagcttgcaaatgttaaggcataacataatttgggggaactcttactgcctttcacaaagaacattgagctattttggcatctgtgactaacatgtctctactggctcagtaaaatttctttccatgaggaattcgtggacaaggttgagataataacacattctgcaccttgctgtaatttggtagctaaaaatgacaagtccacaaattcattgcaggggtatagtgcaaagaaatttccaagggtaagtcagtacagacactacccaactgtatatgcaaaaaggagcacaggaattggaatcaattattcagttcattgattccccaactactagctttaatgtatgtgttatttaacttctataagctgtagttttcacatttgtaaaactgaggtaatgataatattcatatcacaagtagccctgagattcaaatgagattatttacatgaaagatatttgaaaagctggatatatatgggcactattttggggtacttagaatttcctctttgrcttattcttccaaaacagagtcaaatctcagccagagaagctaccgatgttggagtaattatttctattttttttcaagttgacttcaccaaccaagaaaataaactctatgaaaagataaaatagaaaatagtttgttcacatttttatattatttgtcattcataacattttctctgttttgtcacttgacaggtgccagagtagagctctctaaaattccctcgtaggttttttggaaattgtctctcttattcccaatctctgtaggatatataagtgaaagattgagagtattttatatttgtttatcttttaaatatgaaggtgttcaagtctctgattttgattatcggaaatcaaaacaaacaatttgatctctaattctgaggtgtctctagtctatttgaagagacaatatatacattatttaaaattgttactataataaaactgtttacaactgtttatattaatctggtatgtattacaaagaatcttggttcaacctgggcctttacattatttctaagcacatatcacaatgtattccgacaaattccttgtgctttttctttagctgtttttttttttttcttaataatattaggggcttttctagatgcaacatctgtcaggtcagtatagtagtgagtaatgaaataccagcctggctgaaaacgctcttaaaatgtcagtccattctacttcctaagacacctaagaacacctgatataggatgagagcaggcagcaggcaggtttctacagaacaatgaagtttaggaaggagggagatgcgtgatgctagggtggtacctaatggttgcagcaaaagagatacttttgcattgagagtgcaccatattcttggttagcagcaactatttaycacatgcaacatgattatagaaatactagttactactcaggaagtattcactttgcaccagatctgtactaggtgcttttatacctgctatcaaaattaatccttgccaccaactgataagtggacattatttacttcctctcttatcattgaagcccaaaaaatataaataacttgacaaggattatacttccagtatgtaacacagaatttaagccaagttctactcagttcaaaaatcttttttacagcagtatcttcaaagtggcatagatacactactgcaggttcacaaaaactttctaaggggtacatggtgcagagagttttaagaaaatttatttttagctcatccttccaagcatacttttccaaatgaatctgattgagaagactcctgaagattctccttcaccaactctcctttcaaaatctcccttctctgatgtttcagaagagcctatcttccacctatcctgaattcattctcaatacagtctgctcccagaatgggaaaaacttccagagtgtttaacaagtggggaatccgaaacattggtgctagtgttgccaacrtgtataactttaattactaggcaacaaacttcttacaagttgggtagtttataaataaattcatcatttgtgaaattgcttttatcaaataattcttgcttgagttgtcagttgatggatcaaattgtaaaaactatttttttttttgctggattgtatcattattagcatatttagctcaaatgagttcaaaaagataagtaaaatttaaataaaaatttctttacccttatctagttatttatgggaacaaagcttcttggcagttatttatttttttaaaatttagaatataattgatatacctatttttgttacagagaattttggtaggctacttattcttttccctttttaaaatttataaataaaaattgtatatatttatggtgcatcacatgatgctttgatgtatgtatacattgggaaatggctaaatcaagctacttaaaatatctgttacctcacatacttatttgagtagtaagaacatttaaaatctactctcttagcaattttcaagtataccatacattattattaactataatcaccatgttgtatcatagatctcctgaacttattcctcctatctaacaaaaaatttgtatccttagacatagatctcctgaacttattcctcctatctaacaaaaaatttgtatccttagactaacatctccttaatcctcactaatatttttcaaatattttaagcataacatatataacatttagatataattgtgtagaaaaatagtatacaaatacaagttcaagtataaaaaggtaactccagaaagttacagactatcaaagaagagtttaagttgtttttgatatggatgatggaatcaaataattatggtggatacattttttgaaagtaatattatatgttcatttttaaattgacactatttgcaatatccttttattatatcctctgaaactatttatgattatgattaaaacaatttgatagtrcagtaggaaaattatagttaacaacaatttattctattgtatatttttaaatagctagaatagaagatttgtaagattcccaacacaaagaaaagataaatgatcgaggtgattgatattccaattactctgatttgatcattacaccttgtacattataggcatcaaaatatcacatgtaccccaaagatatgtacaattgttacataccaatgaaaaatataaaactttaaaaattcttttaaattaaaaaaatcagtttgggacctactttaaaaagtgtgagagtatacactttaaaaagtgtgagagttttaaatttttcatttggtgctactcaragataaaatcttgaaaacaacttctatgaagaacattgtcctcagtgacatgatttattgctacatagcaaaggaagtaaaccattgtatttaggagcataagttctacactaaaacaggcatctgctctaaccttaaygtcyaatttgttattttaccttagacaagttctttgtcccctctaagccctttctttccatttctataataatgtaggtacttaattggtcagatccttctaaatgtcacataaaattatgtcaagatctagaaaaatttctacacagattaagtgtcatgtatgtatattcacagaagttgtcatagacaaaactgtgtaaaggagagggatgtgcatgttcttaggctaatctcccagagggatcagggattggtatggtctcccagaatgaataaaataagttcaaaaggaggtaaaaggaggaaaaaacatcactacccgaaggggcagaaacactgtcagtcacaatagtgggagagcacaaggcatgtgatgcaaaaattaagaactgcacctttaataaggaagatattgccaataaaatagttctacttgtatgaaataaagctagaacttccctgcctaaatcctgtcttttttcactgtttctgttgtaactctggtttacattatgatcttattcacaatttctgcttgcttgatatttcttaattctgaaatttaataatatgcccttcgtcgtgttcccccaacttggttcctgcttacaattcaattttgttatccaaacttctttttctggtcctaactctcagttttgcctgagtgggcactaaaaagttatcttcctcttcctcttcttaatgggcacatgagagagaacacaaaattctaagagctcatatcttagcgtctaattgatacggattaaaatcccaactctacctgggtagcttggtaaactcagaacttctctgaacctcagttttctttgaatagggataataatttctaaccaacagagttactgtaaagatagaagaacatatgtcacaataaacatttagcatactcaacatttagaaaataattgctcttattaaaatttttcccattattactgttgctgatgcaataaatggaaatatttattggagttctgaatatttttgaaatgaatgttttgtaaaatcagacacattatgaactgatatgaaagatgttcctgtgaaagaggaattgaaatgtgaagagtcacaaattttacgctttctctggaaccagaaaccaaacttaaagtgttctccagaactggaaagcaaggggacacataacaggctgaaaagatctgctatgagtgttgttacagactgaagtgaaagtgactgctggttattataaaatgttcctatgacttgtccatattgaaacagaaattataggcagaatgaacaggagggaacacaaattggctcaacctcttttacctggttaagctctccattgtacccaaatttrggccatttaattccacaaatatttaytgaatacacactgggtatccagaatgtaaagagtctcaatacggaatgaattttatttttgattttatattttgaaacagtcttcaagttatagttayaaatcaaatgggataatcacataggttttcagtcattaaagtaaacatatttttttcatttttttttaatgaacaggatttgctagtccacttactgggatagcrgatgcctctyaaagcagmatgcacaatgccttgyrcatctataygwmtggaamaatgtccyaggtayagggayctgccaacgatcctatcttccttcttcaccatgcatttgttgacaggttggttaatatttctttataaataacgtgctyattggatttaaataganggtgcctatcaaatgtgatttaagttattaaataaaagctaagaagttatggtagtctattgtctgtgatcaggttgtcaccaaaacagaccttaggctaagaatttgcatgcaaatgtataataaagaaagtgtttataaagataaattaaaagaaggtggattaggcaggatacaaaagaaagaaaagtaaaataagtgtacaatgtcagttgaaatccaagactccactagatcctggtagaaggtaaagtataccctagtttgtcctaccttaagaaaaagacagatgagtctttgtacttccatgctaaatagccattggctacaggwtgccctgaggtaggggatgtaaaactcccaggagcttgagtccagataggctttgtggccccagtacccaagggcagccttctaaaggcttcaggagaaagttgttaagagcaaagaatgaaaaagcaggaggatggacacacagaactgctataggaatttaaggccatgtgggcctggcactaacctactacatctgtcatcaatacatctttccttctggaaattgtattgttatttcttctctttttgaacctaacacactttcatataaggaagtacaaactgatctcttccactggcctgaatagtatatgattaattctccagacagagtgcactatggcccaactgtcctatttaatgtgatttaattctcttggagcttttatttcccttattagccttcttccattacatttgtaatgtcttagatatattaggttttagacttaattgtaggtgatgatagcagaaaagaaagtattcagaggaaggtcagctgtctactcttgaaattttcaagaagaaaggagaaaataaagcatcaaatcatgactgacaaatgctatggagtgttctttgtcccctctacagtaattttctcaccacagttaatgaataaagggcacagatttatacctgccattaagataatactatcatcctcttgggtaaaaataagaggagttatttttcgtgttttaaagataaggaaactgaaactgagaattaaagattttacttaatttaccaaaatcttctcttcattcatgtccacaggaacatggacataaaatcaaataagaaagtgaccattatccaggaaaatcattaggcagatttttattggcttcatggcaactctcatataatgagaattaagtaacagtctgtgttaagttttattcagaaatcagtgtataagaacatgtatgaacaccaaagtgttggtgtcaataccaacatcacaaccacctatacccatacataagagagaaaagcatagtgctggaataaaatgttatcagaaaagataaattgaacgctttttaaakaatcatttttatatcactttttggtrtaaattttttgccatttttaatatctagaactacccagtgaactctaaagatttaagtatgaccactcttgccacctccattcaatatagtattaaaaggtctacacaattagcaattaggcaaaacaaaaaraaaaagaaaaactatcaaaatatgaaaggaagaggatattgtttctgtttactgatgatctgcccttatacacagaaaagcctgagaattcactggaaaactgttaaaactgataaattaagtaaacttgcaagatacaaatgcaacatacaaaaaattagtagtgtttctgtacactaacaatgaactatctsaaaaagaaactaagaaaacaacyccatgtacgacagcatcaaaaaataaaatacttaggagtaagtttatccaagaaaatgaaagatgtgtacactgaaactatacaatattgataaargtaactgtagaacacaaaaataaataaaaagatatcctgtattcatagattagaaaaattaatgtcgttaaaattactatactacccaaagaaatctacatattcaatgtaatcctatcaaaataccaagacattcttcacaaaaatagaaaaacagtcttcaaattcatacggaactacaaaagaacctgaatagccaaaacaattttgagcaaaaagaacaaagcatcatatttcctgatttcaaaatatactacaaaactatagtaattataatggcatggtaatggcataaaagaagayttattgttcattgaaacagaattgagagcccataagtcaatccaataatttacattcaattaacttttgacaaagatgccaaaaacaatggggaaaggacagtgtctgcaattagtcgtttggggacaattggatatccacattcagcagaatgaaattggacccatatctaacaccatatccaaaaccaattcaaaatgaattgaagacttaaatatagggattagaaattgtgaaactgctagaagaaagcatatggtaaaagttccaagactttggtctgggcaatgatttttttggagaggagccccaaagcaaaggtaacaaacacaaaaatagacaaataggattacttcaaactaaaaatctccaagcgaccaagaaaacaattaacatgatagacagacaacttacacaataggagaatatatttgcaaactatacctctgataaggggttaatattcaaactatattaaaaagtcgattcaatagttagaaaatagaaaaactaattttaaaaattgggcaaaggatgtaaatagacatttctcaaaagaagatatgcaaacgtccaacaggtacatgaaaagatgctcaacatcactaatcatcaggaaacacaaatcaaaaccacaatgagataatattaatgttacttcacaccttttagaacagctattaataaaaagacaaggacaagaagtattagagactatgttaaaaaaaaaaaaaagagggactttaggaagccaaggcgggcagatcatgaggtcaggagtttgacaccagcctggccaacatggggataccccttctctactaaaaatagaaaaattagccatgggtggtggcagacgcatgtaatcccagctactcgggaggctgaggcacgagaattgttttaacttgggaggtagagtttgcagtgagccaagatcatgccattgcactccagcctgagtgacagggtgagacttcgtctcaaaaaaaaaaaaaaaaaaaaaggaaggaattgttgtactgttcatgggaatgtaaattaatatagtcatttgggaaaacatagcagtttcttaaaaaattaaaaataaaactatcatatgattcagcagttccactcctgggcatgtatcgaaagggaaatatatctgaacttccaagttcattgcaacattattcatataaggcaagatacaaaaccaacccaaatattgataacgatggatagattaagaaaatgtggtatatatacacaatggaacactattctgccataaaaaaggaaaaccctctcatttgcaacaacacggatgaacctggagtttagtatgtgaaataaaatgagtcagacacacaaagacagaaactgcatggtctcacttatttgtggagtcaaaagaaaatttaaactcctagaattagagagtagaggatggttactgggggctggagctggggtgggttggagggaagttggacaaatgatccaaaatttcagttaagtataagaagtaggctgagcgcagtggatcatgcctgtactcatagcactttgggaggctgggatgggtggattgcctgagctcaggagttcgaggccatgctaggcaacacagtaaaaccccatttctactaaaaatacaaaaatttcgccaggcatggtggtgtgcgcttgtgatcacagctgctcaggaggctgaggtaacagaatctcttgaacctgggagaccaaggttgcagtgagctgagattgtgcccctgcactccagcctgggcaacagagtgagattccatctcaaaaaaaaaaaaaaaaagtaaattaagagatctgttgtacagcgtgatgactaaagttaatgacaatatattgtattcttgaaaattgctaagaaagtagattttaactgttcttagcacacgaaaagtaaaaagtaagtatgtgaagtaatgcaatgttaattagtttgaattagtcattcacaatgtatgtatacaggcacacatcaaaatactgtgggcttagttccaggccactacaataaagtgaatatctcaatagagacacaaagttttgggtttcccagtgcatctaaaagttacgtttatggaatcaacccaggtgctcatcaatggtgtattggacaaagaaaatgtggtacatttacaccatggaatactataagaaagaacaaaatgatgtccttcgcagcatcgtggatgtagctgtaggccataatctgaagtaaattaacacaggaacagaaaaccaagcactgcatgttttctcttataagtgggaggtaaacattggctacatatgaacataaagatgggagccatagatattgggaactactagagtgaagagagaaggaggggcataacagctgaaaaactacctaatgtataaggtatactatgttcataacctcgatgatgggttcaatcatacccaaacttcagcatcatgcaatatacctttgtagctaacctacacatgtcccccgattctaaaataaaagttgaaaaaaaaaattaaaattaaaattatgtttatactttaatgtagaytattaagtgtacaatctcattatgcctaaaaagcaatttatataccttaatttaaaaatactttactgctagaaaatgctaacaatcgtctgagccttcatcaagtcaaagttttgctgggggagggtcttgccttgattttgatggctgctgaatgatgagggtgatggctgctgaaagctggggtggctggagcaattttttaaaataagacaaaaaggaaatttgttgcatcagttgatactttctttcacaaaagatttctctgtagcatactatgctgtatgatagcattttacctatagtaaaacttcttacaaaattggactcaatcttctgaaagcctgctgctgctttatcaactaggtttatctgatatactaaatactttgttacaatatcaaaacattcacagtatcttcaccaggagtagattccatctcaagaaactactttctttttttaaccataaaaatcaaatcctcatgtgttcaagttttatcatgagattgccacaattcactcatacctttaggctgcacttgtaattctagttctcttgctatttccatgatatctgcagttatctccaccactgataccctgatcccctcaaagtcatctattaggattggaatcaacttcttccatactcctrttaacgttaatattttgttctccttccatgaatcagaaatgttcttaatggcatctagaatggygactcctttccaaaaggttttcaatttattatgcccagatccatcagaggaatcactatctatggaatatatagccttacaaaatatacttcttaaataagatttgraagtccagattactctctgatccatgggctgcaacatagataygtgttagcaggcatgaaaacagyattcatctcctagtatatcttcctcagagmttttgggtgaccaggtatattataaatgagcagtaatattttgaatggaattgtttttccagggagttggtctcagcaatgggcttaaagtattcagtaaaccatgctgtaaacggatatgctatcatgcaggctttgttgtttcatttaaacaacaaaggcagagtagatttagagtatttcataatgggagtttcagaccagtaaatgagcactggcttctacttaaagttaccagctgcattagcccctagcaagagtatcagactatcctttgaagcttaatcctttattatcctttgagcattaatttctccttagtagctgtgaaagttctagatggcatattcttctaatagaaggctgttttatctacactgaaaatctattgtttagtatagccaacttcatctaatatctaaatcttctggataacttgctgcagctttccattgcacttgttgcttcactttgcagttttatgttatgaagacttctctttccttaaatcttgtaaaccaagctttgccacctcaaacattgtttctgcagcttcctcacctctttgaccctccataggattaagagagtcagagccttgctctcaattaggctttagtttaaggaaatgttgttgctggtttgattttctatccagaccactaaaattttcttcatatcagcagtaagactgtttttctttcttattgtgtgtgtttactggagtagcactttgcatttccttcaagaacttttcttttgcaattgcaacttgactaacttttgcacaagaggcctagctttcagcctacgtgagctttcaacatgccttcctcactaagctcaatcatccctagttttttatttaaagtgagagacatgcaactctttctttcatttgaacacttagaggccattttagggttattaattggcccaatctcaatatttttgtgtcttggggaatagggaggcccaaggagagggagagattcaggggagtggctggtcagtggggcagttagaacacatgcatttattaattaaagtcacctttttaacattggcactgtttgtggtgtcccaaaacaattaccatggtcacgtcaaagatttctggtcacagatcagcataacayatacaataataatttaaaactttgtaatattgcaagaattaccaaaatgtgacagacataaagtgaacacatgttggaaaaatgggagtaacacacttgccaaacaccaggagtagattccatctcaaggttgccagaaaccttcaatttgtaaaaaaaaaaaaaatgcagtatctgtgaagcacaataaagcaaaccacaataaaatgataacacttatatttccaaacataaatagcttataagcagatgaaaaaatgctcaatatcactaataacctgtgaaatattaactgaaaccacaatgggatatcacctctgacttgttcaaatacctcttatcaaaaagataaaagacaaatgttggagagggtgtggagaacacggaacacatgcacatttttgggtgggaatgtaaattagtccatggaaaatagcatggagcttcctcagtaaactaaagatagaatcatcatatgatccactcattccacttctgactatatatcaaaaggaagtgaaatcagtatgtcaaagagttatttgtacttccatgtttgttgtaacataattcacaataggcaagatatacaatcaaactaagtgtccataattgggcaaatgggtaaagaaaatacagtatatgtacacaatgaaatactatttaccatttaaaaagaaattctgtcatctatcataatatagacaaacctggaggacattacattaagtgaaataagccatgcacagaaagacaagtaaccacataatctctttagatgcagaatctaaaaaactttgaactcgtaggagtaggaaatagaatcgtagtatcacaaggtgatgtgcaggagtggaaggggatgaatagggtcaatgaaaatgttagttgaagggtacaaagttttagttagacatgagaagtaagttctactggtcttctgcacagcatgatgattatagtaaataatgatatattgtatcttttaagattgctgagagtagattttaaatgctcttaccacaataaaatgataaatatgtgaggtgattgccattttagcttgatttaatcaytccacaatatatacatatatcagcatcacattatgccccatacatacctgtaattattatttgtcaattaaaaataaaatttttaaaagtgtcaatttgtctagatgccttgatgtttcccacttgtttttataaataaggttttattggaacacagccatgatattcatttacatattgtcaatggatgctttcgggctacaatgtcagagtcgagtagctgtgaccaagaccacgttgtttgcaatgcggaaaatatttaatagctagccgtttgcagaaaaagtttggggatccctgccaaaccacaaaattccatacacactcacacacacatacacacacacacacacacacaccagacaagagaaagaggttttttctgtagcccacctatatttaaagaaagtactatcattaaattcaatgtctgtaggcatgtttgtttagtagagagaatgtcattctgtagatatatagctgtgaaaagccactctgcaacctttgaaaattagaattttctgctcccttagaattctctattaattctattttactattagacatttgcataattattaaaataactcaaaaatattaagcaaagatcaaggtaatttctgagcctttgtaacaaagctgatgaagattctgatgattcaattatcattatacagaaagctagagaactgtgggttaccacagaatattgtgtggcatctgagccatcctctcaagttgctacctatgaagactcatttttccgatcagacaggtctattgactgccattcaattatgcacaaatatatttattggcaaactatgtactgagtgtattttcttaaacattccacatttattcctatttctgggctctgattagaccattcctcaaatctgtagcctacttttcttgacctatctagtttgtacacaatcttcaagactagtttcagttttgacctcctccataaactatgcccaggtcatgtctgtctataactatcactccaaaatctaattatgaataccatttcccaacttggcattcagtgacctcaggtcggtakcctgaaatcagccatggtgagagtatttacaccatgaaattggcaaatggtacacgtcagggcttttattccaaaagacctagttgttaaaataatggccaacacaccactgctctaatctattaactcacagcacattctttctatgtcccttattttggacacatcaattatctttttatttttatctcctcatctgttaactgttttcttggctgcaggaagcttttttgtttaatgtaatcctgtttgtatattttttattttcgttgcctgtgctttgaggatcatttccaaaaatattgcccagacccatgtcatggagcgttccccccattttcttctagcagtttcacagtttcaggtcttacacttaagtctttaacccattttgatttgatttttatatatggtgtgagataagtgtctaatttcattattctgaatgtgactatccagtggtctcatcacaatatattgatgagcctatccattgtgtatttgtggcatctttgttgaaaatcaatcataaatgcttgactttatttctgggatgtctattcttttccattggtcaatatgtctgtttctatgccagtactattctgtgataattactacagctttgtagtatattttgcagtcagatactgtgattctcctgctttgtttttattactcaagattgctttggctattcaggatcatttgtggttgcataaatattttagaattgtttcatttctgtgaaaaacatcattagaattttggtagggattgcattgaaactgcagattgctttaggtagtatcaacattttaataatattctttcttccaaattttgtattttattatttttatttatttatttatttatttttgagacagagtctcgctctgtcacccagactggagtgcagtgacgtgatcttggctcactcccacctccacctcccaggttcaagcgagtcttgtgcctcagcctcctgagttactgggattacaggcacacaccaccatatctggctaatttttgtatttttagtagaaatggggtttcaccatgttggccaggctggtctcgaactcctgacctcaagtgatccactcgtctcagacttcagattgttgggattacagtcttgagccactgctcccagccaattcttccaatttttgaagaagagatatatttcagtttatttgtatctccttaaattcctttcatcaatgttttatagttttcagtgtatagctattttacttccttgtttaaatttattcctaagaatttttaaaatttttatttttaattaacaactaatggtatatatttagtaagtacaatgtgatgttttgatctatacatttttgtgatgctattgtaaattgattgtttccttcactttttttggatagttcattgttagtgtatggaaatgctactgatttctgtatcttgtttttgtatcctgtaaccttactgaagtcatttttaaatttttaatagaattttagcagatttcttagggttttcagtatatacaatcatgtctgcaaacccggaccatttaatttcttcctttctaatttggatacatttcatttctttttcttagctaattgctctagctaggacttacagtatttgttgattagtcatggtgagagtgggtatccttgtcttcttcctgatatgagacaaaagaagttctactttttgccatgaagtatgatgttagcattgggtttgtcatatatgcaaactttattgtattgaggtacgttccatctatacctaattttttgagagtattatcacaaaaggatgttaaacttgttgaatacttttttctattaatacagctattaaaatgatcatatgatcatgtgatttttcacaaatataactgtgaaatttgtatattaactatccttgcatctttgggataatccctcttgatgatagtgaaccagccttctgttgaattcactgtcaaattcagtgttttagtattctttgaagagttttgcatctatgttcattaggaatattggcctgtaattttgttttgtcatactctcctagtctggctttggtatcaaggtaaagctggccttctgaaatgagtttgaaagtattctcgccacttaaatattttggaagagtttttgatggatttgtattagttctttaaatgttggtagaacttatctctgaagccatcaagtcctaagcttttctctgatggaataatttttattactaattcactctctgtactcattattggtctattaagattttctattttttcatgattcagttttggacattgtgtgtttcttggaatttatctattttcttctagtttacccaattcgttgttcttagtagtctcttatgatttttatatttctrtggtatctgttgtaatgtctcctctttcatttctaattttatttatttgcatcttcttttttttcttattctggataaaggtatgtcaattttgtttaccttgttaaaaaccaactcttagcttcatttatcttttgtgctattttcatttacttcttctctgatgtttattatttccttccttctgttaactttaggcatagtttgacctttattttcagttttttgaagtacagcattggattatgtatttgaaatattttttgttaatgtaggcatttattgttataaatatccttcttaaaaatgcttttgctgcatcccataagttttagtagtttgtgtttccattttctcttctctaaaggttttaaatttcctttttaatgttttmattgacccatttgttgttcagaaacatatttttaagtttctatgtatttgtgaattttttgaaattctttctattgttgatttctagttgcataccattttggtcagaaaagatacttgattatttcagtcttcttaaatttgttaagacttgttttgtgtctaaccatatgatctatccttatgataaaccatgtgtgtgacaataatgcacattttctgttgctgttagaatgttctgtatayatctgtcgggtccatttgatctaaaatgtggtgtaagccctatgtttctctattgagtagggtggggtggagggagagcatcaggatgaatagctaatgggtgctgggcttaatacctggttgatgggttgatctgtgaagcaaaccaccctggcaaacgtttacctacataacaaacatgtacatcctgcacatgtaccctgaacttaaaatgaaagctggaaatcaaaaaataaaaataaaaataaaacataaaggatccaattggtaaaaactatctaaaacctatcctatcacctaaaaaatattcagaaaatacaaaaagtggagaaagaaacaaaataacaaaattaatgatatttcctttttgtgaaatttctatttacttcctttgctattttatattacrttttggttttattattgcattgtataggttgttcacaatttttaaaaattagttctttttgtcataaacattataaatattttttggttattatcttttaatgttttaatggtacttttttgctattcagaagttattccttttcatatggtttctttttaattcagtcatttgttcatggctttaaggtcatgaacatttgtttcttatacagtagtactatctgtaaaaagagtgaattgctctaaatctctaattttctttctggactttgcaactggataatctctttttgaagaaatgacagtaatacattagtacagttgcaggtctttattgggatttttagttacagcttaatcatgcttttagttatgattaataggtaagttacaaatagagaagttcaatttatagttaaaattatttttctcctctattcagtttaaggtttgacaagggactctaagctgttctcaggtttgtaaaaacaaacaaacaaaaaactttctggcgtggatatggggttgaaaagtttgagaaggttgaagactccaaaagaaagaattggttgaagagttgtttattctgtttctacacaaacatcagatttgggaaaaactaaagacaagggtatctgggtcattaaatcagcctaacactacaacagccatcaagcaaagctgatggtgtctgtaaatgctcttcaacttggatggtgggagagggtgtagaaagcatgaagaactatttaagaacatactaagttccaggtcttgtgacagaaatttttcatatgttacttctacagatgtgacctgcctcaggaagaaatgtctgcctcatacamttaaatttaccctcgtatgtactcttgtctaccctgtggatcctcctcatgctgtactctgcttacttgcctgttttcttaacagtgttcaccattagttctgcattgatcatatctagtttgttcatagttttattgctaggacctaacaaaatgtcaagaaatacgatatgtgtctgataaatatttaagccctttaaatattatattcaatcattcattcatatttattaattcaatgaatctgttcactcattaattcatttagaaaatacttattgagctcctgacactatactaggcaataggttatagcagttaacaaaaacctcaaaagcttaagttattatcaatattatttcagttaattcttacaattaactaaaattgtatcactacaattatataaagtattgcagtccatttgtatagatgttaatataatttaatatattaatatattttatattatatattactataatagatattatatagtacattttatatactatataatatagtatatactatacatatatatatttcatattaatataatagtgaaattgtctcactacaattatgtaacgtattgcagtccatttttatagatgagaagactgaagataaagaaaaaataattyacttttctttaaatggatactaaaagatgataccacgttttgaacccagattttttgagcaatttaaatcacattatactgtttccaaccatagattatatcataaatattttggcatagtgaagagcatggaaagagtcaggttggatacacttctgaagaagataaagatatgttattatttcagagaaagatgagtgtccaggataaaatttcagaaggggcttctttggctctttattaactttgttttttgggttatctttgtttgtttgttatgttttttgagatggggtctttctctgttgyccaggctggagtgcagtggtgcaatctcagctcactgcaaactccacctcccgggttcaagtgattcttcttccccagcctcctgagcagctgggattacaggcacccaccaccacgcccagctaatttgggcatttttttttagtagaggcagggtttcaccatttggctaggctggtctcaaactcctgacctcaggtgatcacccatctcggccttccaaagtgctgggattacaggcatgagccactgtgcccggcctctttattgactttatagcacatagacctgctagtgtggaaggactttggtgaaggtggtcatttggatcttggagataaactagagagctctattctgacaactagcatttcagaaatttttccatgtagaacattgtgtcaggagtggttaatggcagtgtgggccaatggaagaaaactttttttacatttagaatctgttaattagtatccctgggagttcagataaataatgtagcttttttgagacttattttcttcatcactaaaatgggaatccctaaagaggtcctgaccaactcagaagttatagaaatcaaagaaggtatgcatctaaaatgctctctataaagagtagggagcatagtgtggtaatgaattaaagagtcagagagacctcgactgagatatgagtcagttaaccactcaatcayggagcctctgctctatataatggatatcacataattccacctttgtcagsgtgttggaagtattttaaataacactcaggtgatactgaataataagatgctacaataattatcattctccaacaatttgaataactattcttcaaaaatttgttattctyaaaagtttrtaggttttgcattattccagagcgggcatggcaaaggaatacagtgctttattggggtttagaggtcccaatcagttgatataaatgttacagggtagtattaatgttttagaagattccgttttattgttttatctattcattctacattcattcaataaatacttatttagcatgtgtgggccactcactggacacttcagcttctgcattcttcctaaacaggcatgttaatgtacatgcaaatggggattccacctatacttataagtcaagaggtagttcaagcatcaccttgtcagtgcagctttctccacttccccaaggtccttactccagtcttttgagtctccaagaatttgggggctaaccttttatgtcaagcttaagacattgtattagaattgtattattatgaattatattataattgtccagtttacctagcaagatcttgaattataatttcaattctcattttatctatcacatctttgtatctgtagttttctgtgctcagggtaattcccagcacacaatgtttaatcgaattaataaagtgtaacaatgtccaactgcagtgtgttractagcaaactggctaagaaatgtagttgaaatatactctctgctgtcatttctcaaagcaytctataaatacatttagtgaactcttgcayacaatggaaaattcagtaaccattaaaattatgtgtatttataattgttgggttttaaaatatttattatttattattaaataaggaaggttatagaataggatatttaaaaatattccatttcaaaagcatatgcatgtatattcaaacgcaaatatatctattaatagaggtgagaagggtataaaaatgttggtaatggaccyctggttggtagaattatgcataaattttatttcctttgtgttttacaaattttaaaacttttttgcaacagatatgtacatttttgcaataatatcaaaaatagaggctatttccaaaactgcacagataaataagcaaacaaacatacaaaagggtagagagggatattttatcatttgcctatactcttaaagttgcttaaacttgtgtttgtttccttttatctatttttattaaagtaattactggtgactcatattttmcagaattatctctctcatagattgattsaataaagagatctactaggcagttgagctccaggttctgcatttttcctgacatactctgtatttctctctgtccagctccagcttctgaaatgccctctcagcttagcacggcctgcttatggcgagaaccatgtattcaatggctcctccttatttctgcaagtcttcaaattctccttttggtaattctctgcatggaattaactcttgcaaatccatgtctcacttttgtgtgacctattttgtcttatgctacacattgtccatgttttagcagtagattggaagcttttatgtgcatagccttcccaagaggaaagtaaaaggttggtgctagatggtgcaccttcgataaatgtcagaacagcaaaaaaagggctttagaaatatttccttctttgcacattcccattcaagaatggcttatacagaaaaaaaacaagcacacctctgcacatatgcattccttcatctgttaattcaactaacattaagtaccctttatgtgtcatgtgttatattagaccatggggatgaagtgattactaaatactattattctccaactagtttcctcsagggcagatatgtcaacaactaagtaatgtaaagcaaaacgtaactctgcagtaatagtggctcaataggacaggatatttggaagtgagaaaaagagcaccaaagaacggggaccacaggagtagtcctctttaacccctgaatctgcagcacctatcactatgcctagcataagatagtcaaygaatagccgtttgatactattgtttggaatacaattttatgactggtggttctgtgaagaatgagtagattttttacttgtracatttgtgtgtaaaaacagtcaatatatagagaacaaaacaaaaaggtgtagaaatatgtggttgaaagaaacttcagaaaagtcaatagttacaacattacaaaaatactaaaaacaaaactaaggtttattgtgtgcttactacacaccaaattctaagcgcatcacatgaattgactcattcaatcaatagttacagaagaatagactgaaattccgagaggttaagtaaccrgtactaaatactgtttcataaagggtttagatggaggcttaatagaaggaaagtgtatattggatatagacaaagaaagtatactcttcctccmmcaagggagcaggaactatcaggataagggattattttgaacactagtcaagcagtgcagttactgctgcaggaggcattccaagcaaagcaagttgataaaaaatttagcatgctcagttggggcaggcagacagggaaatgaggattaagaagaatctggaggaacaggctgggcgtggtggctcacgcctgtaatcccagcactttgggaggccaaggcgggcggattatgaggtcaggagatcaagaccatcctggctaacatggtgaaactcggtctctactaaaaatacaaaaaattagctgggcttggtggtgggcacctgtagtcccagctacttgggaggctgaggcaggagaatggagtgaacctggaggcggagcttgcaatgagccaagatcacgctactgcactccagcccgggcgacagagcaagactccatctcaaaaaaamaaaacaaacaaacaaaaaaaacaaaacagaatctgaagaggaacaaacagtgggccaaaatttaagggtggggagatgtgccatttagcatgctcagaagcttgggccagcagttttaactgattcttaaatactccgatgtggctggggctcataggagtcaacctgactggacaggcactagcttaggaactgagaccgaggtataaaaggcaggacatgacatccaccactararctcacagtctagatactaaattctaactgtgaagaggaatcctgtagtggaaggatcatgaaacctggagtcagaagttccgtgattatgtcctgggtctgcttcatgcttcttttgtgtgatcttaggaaagttgcagatctccaagcctaattttcctcacttacaaaaaggcagtaataatactactttcctcataagaacctgagttcatactttataaactataacacattaacaaagactagctcctgtaaagagctaaagtataaggggcttaaaaaaatattcaatgcttttgttctttactcactgtactctaaatgctctccagtattggcatcacctcactgattctcccttagcgtgtctcttaaatgtgtaggaatctagtttaggtgcaaacctgaaacaatacattccaggratggccagcctgcctccctccttagctacagattaattacatcttctggagtgacattttggctgtattttccagtgaggcttcycttctactctactccccaagcctccccttggccatcctgctaagaagactgtcctaacccacatgccttcaaaccagacgccttgccaacttggcagcccagaaacagtccaaccagaagggcggcagtaagaaaggtccctggggcttcaggaatgaacagcagattgcttccctgctggtgactgcaaggctgaagcttgctcagaaaggcagaaatctcagggttatgggggtaggtaagcttggaaaccagaaaaatgtcttaaagtctattctagcaatcagatgggatggcagaggaggacctatctgtttctgggtttcttttcacactgttggattgtgaccagctttaaaaactgctccctgatttgttctctaaagcagaattaatgccctagaacaaagagcggttataccattatagtcatatttgtctatattctgacagctgtttttctttttgatgttattgttagatttagctcttataccactctgygcttgttagactgattcatggtttgtccatctctmccactaaatcatgggttcgtggcagacagcatctatgtatcgatcatttttagcacctagcacagaacctagcacataggagacattcattacatacttattagactaagttgttgtataattgataactctgaggcaggcaggcatcgactgggttatcagtagcattttgttgtggagtgaaatattaatctaagagagttgaattgctttctatcaagtgatgaagacatcatgtactataactaacaacctaaagaatgttcctacaacaatgtagctgctctttgtaggattaatatattctagtactaggaaagttaaattgcttaaattaaaatattgataacttaaaaagcttaaaggcagggggaaaaagaaacatgacttgtcattattgctgaaatcttaaagagaatttcaagatcataattcaaattgtttattttacaaaaaaggaaattggggcccagagaagatgatgtgcccaaaggcacacagttttctgcaaagcggagggaagagtgtcaacctcttgccctgcagattaggagatcctgggggcaatgtggaatatactcaacatagcaggaggatatttaggcagacagaagcagcatgactgtaggatagatctttaccataattatttcgagagccaaatgtcagacccactgaaatagcaccaaatatcagagccaagggatgaacagagctctaaagtaaatcaaaagcccagaaatcaggagactaagaggcagtaaatcatgtgattaagatcatagattttagcatcagacatgcctcattttgaatcccaaacctgctacatctagctacataatctctggcaagctgcttattcttccctaagccttctttttctcagccataaaatggtgctaatatttgtagccatctaaagttacagctttgatttttagtatgatattgtgaaaatatatatgtaacaatgttcttagcacacaattactagatagacaaggaacttgctattaaaatatttgcattctagtgaggagaaacataagcaaaccagaaaagaaataaataagcacaaaattcagttaagcactatgatgtgatataatatctatatattttataaagaattacttgggagaaggttccagttgagataggctacctatagctggcttctctgaggaaatgacctgtaatttgacactgagaccacggagaagaggtagccatagaaatccctctgggacaagatttttaggaagcagaaggcacacatttaaaggtcccatggcataaaagagcttgtcttgcttcaggtttggaaaggagactagaaaagctaaatacggtaaacaagaggaacttggtgcaatatgagattgaagagatcagcagagatcaatagagccctaagtacagtatagaggaaagagtttaaattattttaatccaggtgctgaaataatttttagattgacatttttaaaagttgtcttggctattgtgacaaatagactgttagagtgaaaacttcaaaagtgacatggattactctattgcattggtctaaatgagaaatgatggtgatttcaaccacagaggtgacaatggagctattgggaaacagaaaaccgaaccttatgtatttcagaggtaaaaccaacagggcttgttaatggactatgtgataatatagatgtagttagtaattttaaaaataaagaaaaaagagtaatcaaagattactccaataattagaagcattagagagaagagtggagatgtttactgaagtagaaaggatgggtaagtaataaatttagcaaagaaaatgaactaaagttctctttgaacatctttgggtctttttaggatagggcaaatagatacccgaaagaggctgccaagtagtcagttgaatcttggagtatcaagctcaaaagagagaaccaggttagatacatgtatttggtagttttagccttatctatttagcattaatcacttcgtgttatttaatcatttaagttttaaaacttaattatttagcattatttaaaatcaatggagtgaatgaggtcacagaaattgagtataaacacagaagaaaaggaagcagtctggcataccccatcattaaaaggatgagccgatacagatragtcagcaaaagcaaagaagacagagggtcattgaccagtgaggaagcaggaaaaaaaggacattaagccacaaaagccatgtagccaaaaaaaaaaaaaaaaaaaacagtggaaaaataaatcaggtactcttaagagatccataaaatgaggagagaaaagtacctgttgggtctgaaaacacaaggatgatcatgcccttggcaacagaaaagtttcagtagaatggaagcttcgggagccagactggagcagattctaaacaaaacttttgaaaagttttcacaaaataaggagcatttttaagtgggaagcaggaaagaggatatgaacaagaaaggaggatttgagatttcctttttaagagagaggatatgtattagagaatgattatatgttgttgaaaatgaaaacattcagagaaagagacataggagaaaaaggaaaaaattgccacagcaaggtactggagatgtgaaatctaaagcccaatggagagaggagcctttgccatgagttggaaggaagcttccttcatgcctgaatggagacacaagatagagtatagatgcatgtattgttcttggacaaattagggtgtactgatctagttatttctattttctgattcaagtgtgaagggaggtcatcagttcttaaggggctgggggctgactaggagaataagaattagaaaggaagagtttgtgtaagttagagaaaacaatattagacaaatcatccattatttatgtcattaaatatatcagtggtctgaatttaggaagcatgttggtctggacaacaggaaagaactatagtgtcatgagtttcattattatctgcttgatattacacaaggcatttccatgtaaccatcctctttaatccttaaaaatgaatattaattatttccttttttaaagtctgaaggcggaggcaaagaaagattaaataattcgcccaaagttttagcactattaattgactaaaattaggactttgactcacttctgtcttactttaaattccctgtgttttgattctgtcattatatcaattaggaagtaactgataatyatatcaaaaacattatttatagggtggtatattagttttctagggctaccataacaaaataccacagactaggtggcttaaaaaacataaatttattttctcacaattctggggactagaaatccaagatcaaggtgtctgcagggttaatttcttctaaggcctctctctttgacttgtagatggccatcttcttgctatgtcttcatagggtcttccctgtctgtgtgtctgtgtcctaaacttctcttcatataaagataccagtcatattgcattagggttcaccctaataaggtctttaaaaactttatcttaaaatacactcacattctgaggtacttgggattaggacttcaacatacaaatgttgcagggaagcaattcagcctgttacaagtagtgagaatgaaagtcaaacagtagtggaataatgacagacttgacgttgaaaatgttaaatcagacctagcttttaaaattgtgatgataaaatagagaaataagaaaacaaatcatttgaagggagcaagaattaagaaaatagtattttagaattttttttattttaagatacaggtgactgaatctatagtttaagtgaaatttgctgaagaaatgagagaaaaaacattaaagcatgttgaaatgtttaaacaggtactataaaacatatgggtttaattccaaaagatattctgtagggaaattatctcagattttcctcaaaggaaaaatgaattaaagaacaataactaatgtataaaatatctataagaaatgctattttgaaaagctcctttaccagattattcataacatatctgtttatcatatgactgtttattaatgtaattttgatgacataagggtttcctgaagtatcaaaacaaatttctgcttgtcggattgccacagcagaaaacaaataataacatgcatggacaatacaaatgttatttttatcctaaagtaaagcatgcccaagatayatcttgttaagtacaaaatgtcacaacaatctagaataacaataaggataagaatctgttgaatactcaggaaagaaatattactaaattcaaaaagtcaaagaggaaatggcagctgaaagttttctgtagctgtgtccttatacaaagcatatttattgaaaggaaaaaagttttgtttctgtttttttagaaaaagtgctttcccaagagaaaaagaagcagcacagctcctgtacgtcaggtaaaaaaagtcaggagaaaaagcttcaagattcacatgatggggtattcttttaccaaaccaggaatcaattgctttggagaacggaaataacatttttgaaatcccttaacacyaatgatccctgttctgtgaggtgccttgatgctaatcagacagttgctcatatcagttaaatcattgaaatgtaattacctctagtactcagtgttgaggtatggaggtgagggaagcaggccttgagaaaagcccttactgtagtagtgtcactcttaagttgcgtcgccttcagttatgccatccccatatatttccttttatcctcactacaaaatgaggacattggcttttctgatttccaatgtccttctattttttcatgttctatgagtaaggaagatatttgatttatttttaagatattttatgtgcaattcttaaagttgatatatggctttctgttctagtgagatattagactatgagaatctgaaaattcccttgagacgatcagtaccaagccagaaaaatataataggaaaatttattttacatgcatatctatctctcagaacagtaaggctaataagattcagaaagaaaaaataaattaaaacaggagtactgatctaggaagctggcctgtaccttaccttggctgttggggttttggtctcaataacctagggcataagattttaaagtccataatggggcagaaatgaaagacttgagcccacccaaggctaggatcaaaatgtccacataaatcaaagaccctagaaatctgtatcattcatgaatgagtatagtagaaaaacaaaatccactacaagtcaaaggaagattttagccttcaagacctggatagtaaaataattccctgaaaaattagaaacctggtgcttgcactccacataagttttgtgttttgaaattaaacaaagtactgattcagaaaaagcaagtgcaaaacctctgaaattaaaacaaactaagaatttcaaggaacagattgattagaataactggaccattgtaaactagggagactgtacaggagaataagatyggggacgtaatgaggctccttgaggatcattttaaggagtttcatgcttcaacatgaaaaggaaagcaacattcaggamatactcctttgttatgtcatttaattatagaaacagtctcatacagtcatttgtttttaaaataaataaatagagtattttgaaaaagtgcttctgaagtacaaagtggttaagtggtaaattgaatcacaatctgatcccaaatccaggttaatttctctatattacatgactttatttcttctttcacatagcaagcaaattagtcatacctccaaatttaaacttcagaattctaacttatttcagctggattagaatttctcttaattcttatgctctctttctgtacttgtcaatgaaagatcctttcactttcttcctttatagttaagtcagtacctattgcaaaagtagacttcttagcctataagcattgcatacaggtgacaagaatttgccaactacaaatgttaactgcttgaagagttgtttttcaaatatctgtttttattgaggtatttatttagtattgttgagttctgctcttacataatacttcgtttccaggtaacacacagccctgccaagtattggtatctaggtaatgctgaccattttaaatgaacgtttcaatattgagtctacccatccacgagcatggaatgtgtttccatttgtttgtgttgtctatgatttctttcatcagtgttttgcagttttccttctagaggtctttcacctcgttggttaggtatatttctaagtaatttattttattttatttttgcagctattttaaaaggggctgaattcttgatttgattctcagcttggttgctgttggtgtatagcagagctactgatttgtgtacattaattttgtataacgaaactttgctgaattcatttatcaattctaggagctttttggaagagtcttcaggtttttctaggtatatgatcatattatcagcaaacagcaacagtttgacttcctctttaccaatttgtatgccctttatttatttctcttgtctgattgctctggctaggacttccagtattatgttgaatggaagggcgagagtgggcatctttgtcttgttccagttctcagagggaatgcttttttcttttctctttcagtattatattgactgtgggcttgtcatagataggcttttattacattgaggtatgtctcttgtatgccaattttgatgaaggttttaatcataaagggatgctggattttgtcaagtacattttctgcatctattgagatgatcatgtgatttttgcttttacttgtgtttatgtggtatatcacatttactgacttgtttacattaaactatccctgcatccctggtatgaaacccacttgatcacggtggattatctttttgatatgctgtttgattcagttagctagtattttgttaagcatttttgtatctatgttcaccagggatattggtctgtagttttttgttgttattgttatgttcttttccggttttggtgttcgggtgatactgtcttcatagaatgatttagggagaattcactctttatcttgtggaatagtgtcagtaggattcataacaattctttgaacatcggatagaattcagctgtgactgtgtctggtccaggaccttttttgttgttgttggtaatttccttaccatttcaatgtcgctgctttttattggtctgttcaggctttctaattcttcctgatttagtctaggagggttgtgtatttccaggaatttatccatctactctaggttttctaatttatgtgcataaagatgctcatagtagccttgaatgatcttttgtatttctgtagcatcagttgtaatatctcccatttcatttccaattgagcttatttggattttctatcttcttttcttggttaaccttgctaatgctctatcaattttatttatcttttcaaagaacaagctttttgtttcatttatcttttgtatttcttttgtttcaatttcatttagtcctgctgtgatattggttatttcttttgctgggtttgggtttgttttgttcttgtttctctagtttcttgaggtgtgaccttagattgtctatttgtgctttttcagactttttgatgttaaaggttgtaaaccttcctcttagcatcacctttgctgaattccagaggttttgataggtcgtgtcactattattgttcagttcaaaaaatattttaaatttccgtcttcatttcattgttgatacaatgatcattcaggatcaagttatttaatttgtatgtatttgcctggttttgaaggttccttttggagttgatttccaattttattccactgtggtctgagagagtacttgatataatttcaattttcttaaatttattaagatttgttttgtggcccatcatatgatctatcttggagaaaggtccatgtgctgatgaatagaatgtatattctgtggttgttgggttgaaagttctgtaagtatctcttaagcccatttgttctagggtatagtttaaatccattgttttttcattgactttctgtcttgatgacctgtctartgaaaaataaattaaataaataaaataaaataaaatgaatgttccttcctcttttagttttaggaagggtttgtatttaattggcaatattcctttcttaaatgtttggcagaattcaccaataaagtcagctagattagaaattttccttgtagaaaagatttaaaattaaaactcaattggtttaataaatttaatgttacccaaccaatctatttcttcttgaatgaacattagtagtttgtggttttcaaagaagtagttcattttgtttaaattgtcaaattagtggtatacaataattcataatgtctacttcttatccttttgatatctgtaggttctgtagtgatgctgctaatttattcttgttggtggtaatttctatctcttctaattttttataaccagcctaattagacctttgttcattttatttgtctttttttaagaggcagctttagtttacttgattgtctctattgtttttccattatacatttcagaaatttttgatatttattattattattacttgctggtctagtatcttctgacaaaataagtcacatattttaattaaacagtggcattttacttctgttctcatctttgacatcattaaactgccatatattgttcaaaaattttacatatggtttgttatagaatcagggtgaaatatgagtaataaagacaatgacctatatctgcacatgtggctaatgagcacgtaaaatattgttaataaaactgaagaatataattttaaactttaatttaaaatcgggtatttgtttgttattgaaaaacttacaaatatttttagagcaacttggatgtgtgaacgtaagttattgcctgtaaaatgtatgaattctaaatacacacgaagtatttctgatactgtcctatgtcatatgccttcaatatatactctataattactaggtttttcttaactttgtattaaaaaaaatcacattaacccacattcgactagctataaagaactttgttttctatagttttatacaaaatgatagaggtatgtgtgtgtacttgtgtatatgtgtgtgtgtgtgtgkatatgtgtgtgttcatgtttcatattagtcaagattcaatgagaaaaaacagaaacaatgctagttgttttaataatgtcagttgtttatataataataaataatagcttaaatagatatttgaaaattcaaaagtggaaaaaaaactgaaaatgcctagagataggcattggaggaagcagtaccactcctaggactgggtaaaaataacaaagtagtaagagatattagaatctaatagttttgggaagggcttcaaaaacctgaactcagatttctgaagaggggacactgtttatttagtagtgatatctcatatcacctgacattgaaggaggagcctcacagggcagtaattcaaactcctgagtaggaggctttagtcaactggtacygatagctcatgagtatactagtgctctacagaactagatctcagatttttgagcagagagggatgtaggggtgtgagggaatggggaatacggcctaaagcatgttgaaacttcttaagaggaatgataatgctgattcttggtgtgctgataagaaagctagaagctagactctactgctmttcctagggtcaagaacagtcactgaaataaacaagaaggaacaagtcctttgctgttctagcctatatgtagtgtctatcaggggttcaactagcaaaagagaaatgcagcttacacattctcagccccagtatcccaaagtggaatgtagtaggacatcgttggggctggaaacaatagcttaaaaactggcacagtccacctcttgtctatcaggcattgatacacatttaccctcccatacataggtaaatttcacacaataacaataacaaacttaaggtatttttttcaaacgaagattatttcattctatcttcatgaagaggtaactaatgtcccaaaagccatttctgattaattattcctttctgattaatagccatattatccgtctctgggagatgttatataaacttcaaattttgtcatggtttatataaacattctgtactctaaagagggaattataagattaaatatcgttgatcacacatatgaaataatgagacatgaaatgttaatatataaaaatactgtatatgtatacacayagacagacacaaattaggttatatgtgaaaacacagaaggaccaggaaagaaaagatgcgtagctgctgcagacctcattttatttatgtattttttttactacccattaaatgttatatttgcactcagccagcatttcagctggccaacgctctctacctatcaaatgactcaaactttctttccyagagaatttgaattctgagtgattttcacctttctttggttactgtagtcttccattaaattattgaacacagaaatgctaaaaattcctcaaagaaggccttgaatttcatgcatatagtctttcctgcactactatgtagcaacaccccaaaagtatcttgagaatatggatttttttwaaaaaatcatgttcttcataaaacttaacaatgtgmaattgtgttttggtgcaaagtcccaaaagattgtgctaattgattccacaacacttatttttatgcctttaaattcatgttgaaggtgtggcattatgacaatggagtgattgattgctatggtgaaaggcggaaaattttcttctcaaatggattctatctgaacacagatgagaaactttttttatgtttcttttaactatttataatttgaggaattatgacacctgataccttgaaagtagtgaaggagaaaaattgtgtttccatattagctatctatatcaaatcaggcaagaacaaaaaagaaaattgattttttttttgctagaagcctgatggatgtaacaacttttcctcaaaggaaaaataaaggaaatctcttattacctatatggcaacatctggccaaatgaaaatgtgcaaaaaaaaaaaaagtgaaataagttggggctgtttctggctcagtgtgaagtatgaaaagattttaaagttaggtgttagattggaaaaaatgaggatttatgatcatcttctttgacactttttataatgtgcatcatagaatatatgagaaaaaattcccatgaaattatgaagaaacagatatgataagtggacagatattgggtgaatttaagaaaaacaaagtatttttattgtacatttaattgtaaacaatgtaaataggcactggcctgttttctaagcctttgcataggttcaacaatacggctttcttccttccaaaggctgacctatctattcccactatacagggtcaaatctaataccagagaccaactatgaggctctgataaaacaccattccttcagagcagagtggggagcagccagtgcctttgccaccctcactcagctggagttactcaatacattgttattatgtctgtttcatctattttctaagtcatacctaccggaataggtaatctattgcaaaagtatttctcaatccttgctgcacgaatcagtgggtgtctttttttaatacccatgtgcaagccccaaacacagaaattctgaattaacagatatggaagtctgggcatcagtattataatgggttgagaaccattgcattcatgcccaaaatgaatgagtctagaattcgtaacatttacgtaaccacagatgcgctaaaaatgaattctaagaacacgatgactatagcactctcctaatctctttttttacacagcctagacatcttccttgcaagcttagcactttccttctcatactgagaatcaaattctaccctgttgtgtagaatacttggctagaacattagtatttggccttattctttttagtctttttctcaagaaggttgacactatttaaacttctatcactgagaaagtaatgccaagcaggcagactacccaaagctataacctcaaccacctgtttctgaacaatagatcttacgctaaattaggtccctttggaaataacatcaaatattactactctgaagtagcgaatgtagttaggttaaaaaaatatatcagaagttggaaaaaataggaccaagaaataaaatagtaagccaaagtcaaaccagagttcataaaattcctcgaatgttcatgtttagacccctggatcccctttcagaggcttaccctacctaaaaccagaataatattctaggcacagcttacttgtgaccccacatctttccttccaagctggcattctaccaacttcccagcatatctgctggacaatcatcaatgcataatgacagaaccatatgtaacttcttaaaaatacataccactgttgttatactgaatctatcttaattttgattaataatgattccctcttatttaattatattattctttttagttaggagttgatgggcttaagaaccagattggttcttaagaacattgttttaattcctggccctgccatttactattcatgtaactttggacatgttatttcccaggggctatgttttctctgataacaaaagttattcacttgtagatattctttggtggttaaaaagagattgtatatttttagtttatcttcttttaattcaatggaatgagcaaataactgggttaaggcaaggacgtgtgcagtagtttctcatctactatcagacagttttattaccttagacaagtccctgaacttctacttccattgagagtagccactttgaagaataaaatgcaaaaaaaaaaaaaaattaaaaatgaacaaaacctaagagatctgagcaacatcattaagtatatcaacatatgtgtaacagaagtgctagaaggagagaagagagaactgacttcttaccagaaactatgaaggccagaaaacaaaggattggcatattcaaagtgctgaaagaaaatattgtgaccccagatttctatatctggcaatgttattcttcaaatatgaaaragaaataaagaaatttcccaataaatgaaaaactgagagattgcattgctggtagacttcctccaaccatgctaaaggaagcagttcaagctgaaaagaaaggacactaaacagtgactcatccaccagaaaaagtaaagagcactgtgaaagataactgcatagataaatttaaaagactacaaaaatgctctttgagtttgtaacttattttttctatcctatttaaaagaaaatatataaggctataaatccaggttggtgggcatataatgtatacagataaaatgtgggacaataacagcataaaaatgagagcatgctccatataacaggggtccccaacccctgggccatgggctgctacttgtctgtggcctgttaagaaccaggccacacagcaggaggtgagtggtgaagtgagtataacctgagctctgcctcctgtcagctaagcggcaggtgaactgggcatgtgagggatctaggttgcacattccttatgagaatctaacgcctgatgatctgagatggaacagtttcatcccaaaaccatcccttcaacctccatccatgaaaatattatcttctatgaaaccagcccctggcaccaaaaaggttgggaacagctaggaattatgtattcaacacaaaagaaggcagtaatggaagaactgaggaacaataaagaaasacataacatgtatagaaaacaaatagaaaaatgtcaagaataatgacattttatcagccattacatgacatataagtagattaagttctgcaataaaaggacacaaattggctaactggattttttaaaatgacctcaatatatgttgtctacaagagactcacattagatgcacagataggttgaaaagaaaaagatattttatgtaaaaaatattcaaaagagagcttgaataggtatactaataccagacaaaacagactttaagacaaaaattttaacaagtgacaaaagaagacataatataacaataaaaaggtcaattgctgaagaagatacaagaattataaatatgtatgcacttatcaacaaagccacacaatacatgaagcaaaaactgacaaactgaagggaaacatttgcaagtcaactataatagagactttttaataccccactttcagtaagggataggactagaccaaaaatcagcaagaaaaaacttgcgcaatactatatgccaatgagacctaacagatatttatagaacactctacccaacaacagaatgcacatttttttcaagtgcacatggagtattttccaggattaattacatgtgagaccataaaacaagtctcaaaactttgaaaagattgaaatcatacaaggtatattctccaaccacaatggaaaaaaaatagaaactaataataaaaaggaatttgaaacatttatgaatatatggggaaattaagcaacatactgctaaataatagttgaattaaagaaagaatcacaagagatttagaaaatgctttgagataaattaaaaacaaaatataccaaagccatggagaatagcaaaagtggcaatgacagagattttttatttttttttgagatggagtctcactcttgttgtccaggctggagtgcaacggcaccatctcagcttattgcaacctctgcctcctgggttcaagtgattctcctgcctcggcctcctgagtagctaggattacaggcacctgccactaggcccagctaatttttgtatttttagtagagacagggtttcaccatgttggtcaggctggtcttgaactcctgacctcaggtgatctgccagccttggcctcccaaagtgctgggattacaggcatgagccactgtgcctggcctgaaatttatggttattaatgactacattaaaaaaggaaatatcacaaattaataacataaccaccagccttagaaacaagaaaataaaaaatcaaactaaactcaaataagaagaaagaaatagtaaagactcgagtagaaataagcaaaatagagaatacgaacacagtagagaaaatcaatgaaacaaaaagttgattctttgaaaagatcaacaaaaatgacaaacatttagctagactggccaagaaaaaaaaaaaaagaagattcaaattactaaaatcaggaatgaaagaggggacattactattgtctttacaggagaaaaaattacaaaggaatactataaacaattgtatggcagcaactgatactagataaagtagataaaataaattcctagaagcacacaaattaccaaaacagactcaagaagaaatagaaatctaaacagacctgtagtaagtaaagatacaagctactcatccaaaaaaaaaaaaaaaaaaaaaaaaacaacaacaacaacaacaaagaaaatctcaggacaagatagcttaattaattgattttctcacatgtttaaagaacatcaattaaagtctttcaaaaaaagtagagtaggagggaacatttcctgacttactctatggggccagtattatcctgtgagcaaagtcagacaaaactatcacaagagaaaactacagaacaataacacttgcaaatacaaatggaaaaaaaattctaagcaaaatactgaaaaactgcccagcagcatataaaaatgtttatgtcaaagccaaattggatttatttgaggaatacaaaggtggctcaacatattaaaatcaataratttattataccacattaatataataaagagaaaataaaatcccatggtcatctcaataggtgcagaaaaagatagtacctttcatgatttaaaaaacaaacatgcatcaagctaggaataaaaaaagagctttctcattttgataaataacacctatgaaaaagccacagctaacacatcatactcacttattaaaaactgaaaaaaaaaactcaaataattttcctaatgtaaagaacaaggcaaagatgtttgcttagactacttctgtttcacattgtatcgaaggtttaagccagggccattaggcatgaaaaagaataaaaattgtccacactggaaaggaaaaattaaaactatttctgcagataatagtgtcttaaatcataaagaagctacaaataaacagtttgaatgagtttagaaaaattgcaagatacaaaatcaatatataaaaatcagttgtatttctaaacattagcaataaacaaactgaaaaggaaattaagaaaacaatttcagtaatatcagaaagaatagaatacttaggaataattttaaccaaatcagggcaagacttatatactgaaaactataaaacactattgaaagaaattaataaagatctgaataaaataacaggaagacccccccttgttcacagattggaagacttaactatcattaacatgacaatactttctaagttagtctataaattcaacacaatctctgtcaagtgagaggaagttaaaagatcatgattcaaatgccacagagcctcactgctcttaatgttgtagtagattttcttgaataaatgtttcagcatttgctgtgtacccttagaataacttctagagactttaagtgggggagtattattttttcataattgttactagttacacttgttttgcaaaggagaagatccgtgaagcttctcccactgccaatccagaggtggaaatgcagaaaccctttttaaaaaaaaattcctacactgaatgtaatttcaatatgtaaaacagatacaaatagaactgctctaattgtgattggggtaaagtctccaaagtccatttgggtggcaagttctcaaatatttcacggactccagatgacttatttatcaaaccttggattagatgacagtattcttttttttttaccttttaagttcaggggtacatgtgcaggttgattacataggtaaactaatgtcatgggagtttgttgtacactgttggttgaagtataaattagttcaacccttgtggaagagagtgtggcaatctcttgaagacctaaagatggaaataccattcgacccagcaattctattactgagtatatacccaaagaaatataaatcattctattataaagaaacatgcatgcatatgttcattgtagcactattcacaatagcaaagacatggaatcaacctaaatgttcatcagtgatagactgaataaagaaaatgtggtacacatacaccgtggaatactatgcagccaaaaaaaaaaaaamaaacaaacaaacgagatcatgtcctttgcagggacatggatgagcagtgttctttcaagccctaatatttgtgaagtgtctaatatgttatttatatatctaagaactctcctctctcctttgtaaggaaaactgcttttcttaagtgccatttctctttcactccttcaaggaaatctgttcacttttccttatcttctcagtaaatgatatctaagtatttagtgcatacttaattcttttaagctttattgacagttacgtcagttttgagtctaagcccattaggtaatcaggcctctgagaagctcatattttttcaatgagtatacctaataacaacttctaaacaactacagattctcaaatgttttgggcacaacaacaaaaaatgataaattggaccctcactgatgcttttaaaagtaaataagcaaatcataagaaatcagggatatgggagataaaaacaatgattctcackgtccaaggatatataagtgggtaggggaaagccttcaaacaaggagtttactcctttgacctttgataaaaggataagctttgtcagacgggcccaaagaggagcttgctgataagagttgtcacaaccactccacctctcagaattcctctgccttcgccacttggctgtggagtgaaatatgtcttcatagctcctattacccttgatttttcttaactgggcctttctcatttcatgaattttactactaatcacttggagaaaatagataataagtaatcaacttgggattttaatagaaatttcaaaatgttcactatcacaagtccatttggtttatattctggagtcttcttgagatgtttctgagttttctcctttgatgttctaccctctgttatttgtttgttctcagagggggtttcactagtctctcactcttccacaaattgtttgttagcagaagaaataggaatccttttctccatgttatctccctttccatagtggagatttaataaaaataaaataatccattttcctttcttgaaagtggcaattaatatttttaactccagatcgaatgatgctcagatcactagcttttttaagacatactttagtttgtcaatttttccaattggaatagaggattagaagagtagaaaaggaaaaaaactaagaaatattatgtaaataaaaattttggctggagaaggaaataaatggtaagtacatgggaggatatctaactactattttggggcaaaacgcaaagaaaatagtctgttttttagcatttgatcgatcttttcttgggctcctttttccagcagtccagatcatttgttgtgattaagatgtcaggttgtcagcttcagttgaatttgctctctgaagaatgttttacattatcttctttgttcattaggctagactttaacacatcatgctttttcttatctaaattgccaatgatattagtgttattcttgcataaattatttgtgtattggtgttctgtatatttctataattgtaaaccataaatactcttagtcatgcatagaatatttgctgttctttggaaagaagcatttgagttcatagataattcatagagaattttgcttcttttagatggcatctctgtgttcacatattttttactttctttgctttcttgtcttatctacagatattacctctgatttttcttacatttagtatgggccataggtacttagccccatcatatgtattggtcccctgcctctaatccctccaacaacaacaacaacaacaaaatccaatctgcgtaacacctccatataattctttctatgcaccattttttcacacaattccactcttcaaagggcaatagtcttccactgcatatatgttacatacagaataaattcaaatactttgggctgatacccatagatttttgctattttgttcttgctgcccacttttctactattgttttagtctataagcaccaaactaagcactaatttttctcattttctgaagcagaggtggaaacaaaccttgcctgttcatatgcagattatcatgtaggtwattacatgaagattatcatgtagattattacataaagaataattcctctggattcctaccaaaccatgtcaattactggggaggctacaagtgttagagtttgtgtctgaagggccttatgcacaataggaatgatatccttttgtctgggggaaagacttgtcattcaaaataaaggagttctatatctgtacagatagtagatatatgataaacttttccactgtaattctcagaatcaagtgaaatctaccacagttggggagagcagtaaggctattaatgtcacatgaaagttgatgcttagggcttagggatatagtactgggaatatttcagtgaggatgttggaaaccagaaagtattgtctgctatgacaagagtgttgggtatgtgaaagtgtgcctgtactacatatgctcagtttgaacttatttaactgttattaccttgaataatgactcttactttatagcacttgaatacacctttctccatcagatacacgttcttggtctttgactgaagatataaaaatcatataaatgattaaagatataaaaagagataaatagatataaatggtttaagtggctttcttccctgaaaattccttaagggaaggactctgctttctgaagcttttcatctcccattttactacatacatttcctgtacttgcctgtaggtaatagcttgttagtatctattttctgaatatatgttttgaagaaacataatatattctcctcattcccaggggatacttctgaaaaccctctgggatagttacttatcaaatatttattatcaactgtgtacaggcacgattctcttttctatggacatagcagtgaacagatgaagtttttatttgtaatgtaaaatgtcacgtagttttccactcaaagatctttttcaatgtttttctttttcctgattaacttagaaaatgggcaagtcatataggcttactgagtgtatgtgtgtgtgtgtgtgtgcagaatacacaattggaagcacttggtgtcctggaaagtgccaagtacaaaagactcaggtttgattcctactgctccatttactaactaaatagaggaaagttgcctaaaccctcactttttgtttctttgcctatttttatatgtattttaatgggagtacttttgtacaaatacctcattaaggctaagaacacttatcatatttagactgcaggtttcaaatgttgattctgccacttcacacttactggctgtgtaaccttaggcaagttttatatcccttttgtcctccagttttctcatctgtaaaatacaagtataacatagctcatagggttgttctgaggttcaaacgagttcctgtatgtgaagtactttgaataatacctggcatacagtggtatatgagctaactctcactactgctaccatactacatttcttgcagttttgttggagaaataaatatgatatatatatatatcaaaattctcagcatagcactggatgcatgactgtcatccaataaattgaaattattactgaagcaatcagtcattttttattattctaagagcctcagaagcatcactctagtgaagaatagtagaacaataatktatgttaaatgaagagaaattttggaagaaagagaggcagcatagccatcttaagaaaagtaatagctatttgtcatatgtagaagttgtcttagtcactattgctcccctggcatactatgatctccactaaacagaagtattacattttgatttattataatttaatataatacacacatccattataatcatagttctaaaattaaaatccaggaacagttacttcttatctaaaccacttagattcaatttaacccttgggatcaagcccagactccccaccctgatatgcataaggcctttcacagtgtgacccacctccacctctctgggctcacttgttgttgatcccgcactgctctacattgcatcccacaccagatcacttttattttttcaattacatcagtgcccagggtccctgtcagtctacgcattctatgtgatacctttcccataatttactcatccaatttaaataccactttctcgtttcccatctggttagctgcttctgctgtaatcccataggctttatacacatctttaagagcatcatttatattaccttaacactttttgtatgtgtttatcacaacatggagagagatcaatgaggatagggactatgcttctacatcactggagcttgacatgtcatgattcttaacatgatagaatatttattgaataaataaatggacaactcagtgaagggagtaaggtaagttttgttatcaccacttcacaggtaagaggggtgaggctttgaaggcccatcagtaattcctactgaaagccaagttaatagcagacctcccatttacacccagcattgtctggaggtctgttaggagacattttctagattcatcttgactactgtggccagtgtggcctggctcattttatttgagtgcaatttctgcctaatgcagtgtmtctcaatcctggatgcacattgaattattcatagcagggtgcctgatacttaatgatattaaatgttttttggaaaaggagagaaaaaaacaccgaaactgcctttctttcttaaacttttaattatttaggcctttttggttcttatactaagtttctccaagtttcatcattagtttaagtattttaatctgattttaactgccttactgattccccaagggtttgtttccccttttttcaactaagttaagaacttctagactatatacttaaaattgtagttaattgagatcggccacagttgaatttcttagctatgtaacaggattttcatttgaagctatttattcctgacaatctctactcttaaagtgtggagttctcttaaaggggctgtttttcagtgaaaatttccagatactcctcaaatgtgtttcaacattagccaggaatcaggaggaaatagagctcctgggatgctattatttcaaacccaggtagatgctccaagtttttcccagtggtctcagtaaaagtaggctgtctatctactaccgtgttgctccctttgagctcccaaactcagctgttggtccattgaattataccgtaactaggcacgattatgtcactgcatggcttaaaatcctccaatggctcctcacagcttttaaactaatattgactaattacctttcatgcaaaccctacagtgtctgtgttaaaccacatatacctacagatatccacataatatccttcctttcaatccatctgatctacttgcagggtcccagaagcgtaattcttttccttcatgcttgtgctttactcctactagaatgctttttttccctcttattactttgcctagatctctgctattcattttttaaaacttaagttcaagtgtcaccaaaggggcaccttgaccgacaccactcaaccctcatccaagtggatactaactcctctttctcttttttcccaaggcatgaagggcccttctctgctggcattcacactgtactgtgmtgaattattgaccagattttagctctttgtaagacaagcacctttcctcatttggctttctacttccagcactcggtgcaatgcttattacrtgccaggcactgtcctaactgatgggggttaatgaatggtacaatctaccaagattcaacccaaagtcatcaacatttcttagatcctttcttctccaagttctgatatctaaacactaaattagtgattcataaaatgtttaaataatttgaataatttaaaaaatttaatcttaaataatttaatcttgaacaatttgaaaaaattttggactctctagggaaaaatatacaattcctatgtattttatatatgrtttatgagactttataaatatactaatatgaattcagtctcctggttgaattcatattgtttttaactggcaggcactgtaatggacacaggacatataatgaccaataaggcaatatcattgctttcggcgaatttcccatataggcaaaaaattacacatgatcaaataactgcaatgcaatatgacaaatgtgataatcaaaggaggaatatgtcaactcttaaaagttttcacagatgtagccattgagctaatcttaaaggggcaaaagatgtaggagaatataaaagtttaaagaacccctatggaagaaaaatcccaaaacaaagtatttataattttaataacaataataataacatctatacttactctatgctacacgttactctaattgattttacatacattaattcagttaatgctaaaaacaatcccttgtagtaagtactattacctattggtttcttagggcttccataatacagtgcaagcataactctaagatatggaaggtttggcttcggaccaccacaataaaacaaacattctaataaagttagtcacattaatattttgatttcacagtgcatataaaaagttatatttacactatattgtagtatatttatggtgcagtaacattatgcctaagaataaaatgtacataccttatgttaaaaatactttatgctgaaaaatgctaagaatattctgaaccttcagcaagttgtgatcttttttctggtaggtcagacctctggtaggtctagcaggttgatggttgctgactgatcagggtgatggctgctgaagtttggagtggatgcaacaatttcttaaaacaagaaaaaaatagagtttgctacattgattgactcttcctttcaaaaaatatattcatgtagcatgtgatgctgtttgatagcattttgccyacagtagaacttcttgcaaatatggagtcaatcctctcaaaccctactggtactttattagataagtttatagaatattctaagtactttgttgtcagttcaacagtgttgacagcatcttcaccagaaataagtttcatctcaagaaactattttctttgctcatccataagatgcaacccctcattcgttcaaattttattatgggattgaataatttgtttccatcttcagggtctacttgtactccagttctggtgcaatttcccccacatcwgcagtaactttctccactgaagtcttgaaccccctcaaagtcatccatgtggtttggattcaccttcttccacactctatgmatgttgatattttggccacctcccatgaaaattaatgttcttaattgtatctaaatagttaatcccttccaaaaggttttctattcattttgctcaaattcatcagaggaatcactgtatgtcggctatacccttatagcatgtatttcttaaataataacaattgaaagtcaaaattactccttaatccatgggctgctgaatggatgttgtgtaggcaggaatgaaagcaatattcatctccttgtgtatctccatcagagctcttgggtgaccttgtcaatgtgcagtaatattttgaatgaaatctttttttttttttgaaggagtgggtctcaacagtggacttgaaatattcagtaaatcatggtataaacagatgtgctgtcacctaaacatygttctatttacagagcacaggcagggtagatttagtgtttttgatggcctttggacttttggaatggcttcaactgaataagcactggcttcaacttaaactaaccagctgcattagctcctaacaagagagttagcccatcctttgaagctttaaagccaggcattgagttctttctagctaagaaagtcctagatggcatcttccaatagaaggcaatttgtctaccttgaaatttgtttgtttagtgtaatggctttcatytcttatcttaacaagatcttctggttaattttctgcagcttttccatcagaacttattgcttcacctggcacttttattttatgaagatgggctcttttcttaaaactcttgaacaactgccagattcaaactttccttcttcaacttcctcactgctctcaggactcataaaattgaagagagctggggccttgctctggattaggctttagcttaagggaagtttgtagctggtttgatcttctatccaaaccactaaaactttcttcatatcggcaataaggctgtttcactttcttatcatttatgtgttcactggagtagcacttttaatttccttcaagaatttttctgttgcatttacaccttgactgtatttcacataaaaggcctagctatgttggctttggacatgctttcctcattattattcttacctctaatatttatctaatattattcctacctctaggtaattattcctacctcttgatttaaagtgactcttcctttcaattgaacatttataggccattgtagggttattaattgacctaatttcaatattgctatgtgtcagagaatagggaggcctgaagagagggaggaggactgttggtgatgggggcgtgagggaaggaggatggctggcaggtggagcagtcagaacatacacaaaacttcaccatcttatatggatgtggtttgtggcaacccaaaacaattacaagagtgacatcaaaaatcactgatcacagatcataataagagatttagtaatattgaaaaagtttgaaatattgtgagaattatcagactgtgagagagacatgacacgaacacatgctgttggaaaaatgtcactgacagacttctgcaattggggctgccacaaaccttcaattcgtaaacaatgtaatatccacataaagcaataaattgaattgcaataaaatgtggtatacctgttccacagactgggtagcttaaacaacataatttttttttctcacaattctggaaaattaaagtctgagatcaaagtgtcaccagggttggtttcttttaaggcttcttcccttgacttgtaaatggccatctttttcctatgtcttcacatagtctcctctccatccctgcccatgctcaaatttcctcttcttctaaggacttccttcatattggattctggcctactaatgtcttcatttcaacttaattatctctttaaagatcttatctccaaataaagtaacattctgaagtattaagagttaggacttaaaaatttgaattttacagagacacagtttagctcataatatgttataatccccacttcactgaaaagaagagtggagcacatgaagttaagtagcttgccccagtttgcagaattgttaagtatcacaatcatctagctccagaatctgtgaggctaacctttagattgtatgattctctttttatattttaaaataagaaataaaattcatagacctattgaattaattttaggacaactcttttatttgtggtacaccataattcacaaatagcaaaaatttgcctatgtctataccataggcataccaatttcttgaaagaaaagcagggtctagtctggttagtacttggatgagagaccaaatagcaaatayttaaaatgtcttttctaaggaaattaaattggctcctatattaagctgtagaactaatggcttctgctctgtgcaagtataatggccacaactaacctcactgcatgttaagtactgcccttagagtacctgatctcatttatgtcttacagctctttaaagtttgttattatccacattttacagatgaataaactgagacttccagagattatcttctctctcctcacaaaaatcaataacaggaatttgaaacaagttttcttatgaggaggttttgtatttctgacttctcttcttgctgccacatcccaaggccaaagttaggatgccttgtataagyctttgtgcttgtggaaattggactttcccctcttttgtgttcatctggcaggttcttcctacgttcataacaagatatattgtacrgctttccccaattcccctcactttcactgcctgttgtcaatgtgagctgtttaggtccctttcagcactcttaaagtcacctcccaagtactctgtggccctcctcaggagggtattctaagttagtcatcatagatacatctaagtccagatccagaatctcatgttcatggcatcctctttgacctacttagctgttgccgcctcataccctactaagccagtgatggtctttggctcctcatagcctgtgaataaaaaagggtttaaattctacagggataaatcatatgtctttagactactgttattagtgtttcacaactgtgccgtcaccctttcttacatactctgagagattttgtaatcaaattctgtcacgtaaggtgaaatcagaagatgcctagttctcacttctgtgtatagctttgaaaggcctgctaatgcttggaacaaaacatgaaagccttgtccacctttctgttttaattcctaattactaatttcttgcatgttagtggaaaagcattaaacttggaacagagcaccttgattctggtcctagctctgccacctgggtgttataataaaagtcacaggaatctaaaatggaaccccagatcttctactgctttctagttgagttactattggcaaattcttaaattctttgactcaattttttcttctgtaaaatggaatcaataaaatattaagcaagatattgttcaaaggaaaactttagccaaattaaatttaaaagagtttaattgagcaaagaacaatttatgaaccaggtagcttcctsagctagagtaggctcagattctctagcacagccacatggtggaagaagattaatgtacagaaaaagaaaaataacgttaaaaaaatggaagtgaggtacagaaacagtcagattggttatagcttggtgtttgacttatttgaacatggtttgaacagctggccacctttgattagacaaaactcggtgattggcacaagaatagactatagtctgtttacaactccatttaggttatagttcacaatgtacagagaaaccttcaggctgaacttaaaatatgtaggagacaactttcagctaaagttgatttaacaatatattaagagtttattttatagacattgctttattgctaactttgtcatctgggttagattataaactcaagattattgggtagatagttggcacctaatctgtgtgcaaggcactgagaaacaaaagataaaaagctgttgttcttcagctggttggcagcattgatattcctccaatgtacttgtgcctgctttgaaaacaacaatgcctctgcctctatttggatttgttccctcacagtgaaagaaaaaagagtgattgtgatcctgaatttctgaaataaggagcatgtttaactgacaatctagcatctgttttctgtacctttcccacccagttgacaaattctcctccatctgcatcgcttaaaacttagtcagaaagtaacagaaacctcctcatggagagaaaggaaggaaagaacagaaacctagatagggaacactaaagtgtcagagaaagaagcagaagaactgggttctcatcttaactcagtcccttaccaactttgttcactactttctctctctctgcctttttttttaaagtatgatttcacattatctccttcgttgtatttcttatgctaatacatatcctttcctgatcttgtaatgtattcattgctgcttcttgagtataaagtgtgtgagtcctgagtcctctgagaaaaggaacacttaaggtgtttaatgctaattaatgcaggtgtctgttggataaacagcttacatttcaagatgaaggtcaagcagagcgtcttccaagagagaaaatctacacatcagactttggtagaagcatatgcatacttgcaactgcagaaacacccctgtcatcctgtgtaaacacacagagaacagggtacttactattattagtaacagagtggtagccaagaccccttgattccaatrttggttgtaccgttaactgtgacctttggattcaaattttattttgcctctgtaaaatgaggggtttggaagggaagaaaacaaattactgctttttcagaactaagccaatcatttatattgtctcattttatccttaactattrttacttgacatttcacttccttattttatttttgttctcataaatacattaaaatagatagtaccatcccttttctataaatgagcacactgaggcttagagagttttattggattaagtttaaatggaaatgtttattatcatttaaaaattacaagtttgttttaacaagtaactgcttcaaaacaagtactacatgaaaaaaataaataataataaaagaaaaaaaatttaggaatgcactggccttgctattatacaactgcaattcaataaattttgagtgactagaaattcrtgtggctggaggcatcgcaagctgcagttctcaaagagagtgtgattgtcacgtcatctgtcctggcctttcagaaagatgatatccaagaaaaataactccagattctcttgtattttcattatctcattattcccatggcttcagttatcagctagaggttggtgagctgacttctcaatttgtgtttccaaagttaatcttactctgaaatccagacccagatatctagcgaatgacctgacatccccactgaaatgtctcaaaaacatcttacagcacatctcatctagaatcatgacatcagcatcctcccctaatattccacttcttcaggggtttctgcatctggtaatacaaacactttgctcagtagcataagccagaaaagtaggcattttctgtggtacctggcccctcagttgtactgcttggatttccagacatcatctattttcctggacatcattttctcactgatttctttatccccctgatgcgtgcatatccaccaactcctactcttcctcagtcccttctctgcaacraaatctgtgtggtcttttacaaatgataatctgttcgtgttatcattcaccttcccagatacaaacagtgactttctgttaggaaaaaaacacaaatctccctaacatggcctctgctacccttcatgatttggcctcagttcaccttcctagcctcatctggagctatttgctccttgatccctatagacatattggtcaatttttaattccttgaatttgtcgcatacttccaatcaaagattctttccaaattccattctgtccttcagaaatattcttctaccatttctctaaacagtcattcttcaactcttgaagaatgcaccatcaaagacttttcctcaggccacagaccagatgaggcttccccattaaatcctgttaccatgttacattcttccatatttgccagtccataactataggttgatttctgaaattgctagttactgtctatctccaccactagactccaaatactatagggcagaaaacttcaccaatgctgggcccagagccagtttattatagatatttagaatatattcattcattttttaaatatatgaatgaataaataaataaaaaggtcttctattacatatgtgtatgtaagttttttttgtgtgtgctcatggtggtggtagatgtgttacaacgaatcagttcccaaatatccaactatcttaaggcttccttgtttgttctttttttaagtaaatattttataattattttatttgtaaaaatgttgtgaagatagaacggagagttcctacattttccatacccaattcctctattattaacatcttcccttggtatgggacattagtggacattaaagaaccatgttgatataattattatcaaccacagtcaatactttagattacttagtacctaatatcttcttctgctccaggatcccacccaggatactatattacatttaatcattctgtctccttaggttcctcttgcctgtgatagtttttcagactttctttgtttttttgatgaccttcacaacttygaggagtactgctcaggtattttgtaaaatgtcccacagttgatatttgtctgatttttttctcatgattaaactgggatatgtgttttgggatggacaaccctagaggtaaagcaccattctcttcacatcatatcaaaggtgtagagggactcaaaaatgtaccccaaagtatggtgccttgtgatgctgagtattttgaagtaaaggagattggaaggcctcagaagcaaagtctctggcccctctttctcctgtgaaataaaccatagaaactagactccctcttccccaagatcataaaaactagaacctttcttttccaaaacaagccataaaccctaaaaatattactatcatcttctcccacctttctttgtagcagctggccataaagaaatactctgacctacattatttgatagtaggtcataaaaccttcattgctaaggccctgccctatacgtaggaggagggactgctgcacagagaggtcaagaagaatacaaacagacagggcttactgggttgtttctctcagtctattacattagatcatactcttttgtccaaatttctgcaacactggccataagcataaaatctaagcataaaataaacaattttccctgggtctttggctcttcttttctgaagtctcccatgtcatataaaactttgattaaattattatgcttttctttgttaatctgtcttttgttataggagtgttggccatgacccttatgatgggtagagagcaattatcacacctctatcacccaaaaagggctatgctattaacataacttaccattgtgaatgttaaccttgatcacctggcagaggtagtgttggtcaagtttctcaaactgttaaatgatttcaccatgtttttatactgcactctttgaaaagaagtcactgtgtgcatctcatacttagtgagtggggagttatatatagtaccttcaagacagagtatctacataattatttgaattcttttacatgatagattyatatatttctctccatttattaatttgtatatttatagattatatctgtacagactcctctatatttattttatacaactttattttgtggctcaaactcttccagctttagcctttaggagtgatttcagttgactactctgttcctttgaaatatctctaacattgtgggtggttgtcgtttctttgaacatatccttagtttatggcactaaaagatgctcaacattcatcttgtatatttcttaccccagccctagaacctgccgtttcttcgaggaaccccagttccctttactggagaatatttcttctgttctgcctactttttcttcttctggcattccaattatgcatatgttacattttttggaaattatcccataattcttaattattttttattctttctctttacatttcagtttgggaagtttctcctaacctagcctcaagctcactgattcttttcttggccatatcaatgttagtgatatatacaacactgttggagtgtttttgatttctaggctttctttcaattttttcttagggtttccgtctttctgcttacattattcatgattttctgcatattatttactttttctattagaaatgttattctattaattttatattatgtatagttttttaaaattgatattattcacaattatttcagattctatgtctcatagttccaaaatttatatcatatctaatatgatataaatgattctaatgattgctttatctcttcagattttttttcttctctgttgccatgacttgtaattttttattaaaagccatatgttttattaggtaagataaactgaggtaaatgggcttttagtgtacaaatttatgttactttggcaaggagttgcacaatgtttaaatgtttgtcctagttgttacagttttgagatgagaggcctcaagtttctctagtgtatttgtttttgtctctattcttggttttgggtttccctacatactcttcctcagagatagttcatgtatttcagctcttttagctgtaatccactgttgttatactggagatttgttggatgctggtaaagtatgagagaggggagtgttcaaaatattctaattaaatcttagtcctttagtaggccagtgcattggggcttcacaatacagctttttcttcttttgcctctgcccctctatttgcttccctggttgcagtatttctatttatttccttgaaactcygacccctgtggcttatatttacttccccttaggtgagacaggaagactgaaagaggctggactgaaaggaattctcttcctgaaactgggataaggctctaacaatttcccctggatcatagggctttgatatggagaatgtcctgggcatatttcacaacggtcactctcctcctccctgtaacagagtaaggagagtatctttctgaggtcttcaccataaaaacctggtggagttcctggaggtaaagccccaaacatgtggaagttcccctaagacagcagcacccaggaatttcccactatcttcactagtctagactcagtctccagccattcatcgaagtgtttcagtgttcctaccactttaggaatccagctgctcctgcccctggtaagcagatctcagctatgtacctctggatgaacccatctctccacttttgaggatggcagtttgccccgcaacttcaattctctcatgggtccaagaaaatttgttgattattaatttgtctattttgttcttattttaaggataagggtgaccagagtctttacatgtctgacctgaaatcagaggtcccatgccagcttttatttataaaacacatctttccatatttccatctgtgttcatctttacatttttctaatttttctgttgtgaatttcactgtcactcagattttcagaaaaactatctagattcagttcaaattaagttttgctaaaaagatgactaccccctcctccccaaatgtcaatgtaattatctgagttaaacattaatattcccatgtgagctattctagtcatggtttggtgaaattaactgaagttgagaatcactggtgaagaacttaatcaagattaataccttcatttgaaaaggttgatgaggtgggtgagcacattaatggtttcatccattaaatcttttggtgctgagaattgatgtccttgtcctacttaggtaaagaatttttatttcatggcagaaacaagattatttataaattgaactatagaagtaatttttctcgattgacaaaaggtacaatttttgcctccagcccttatttagtggctcactgtatatcaggctgttcccaaatcagtcaaaatttgacaggggtggtggagggattatcagacagcctccttctcattttaaaaatttaatttaccaattgaaaacacatggttagtacgaataaaatgtctactaaaaattatctataatgtgatttccttttttggtaaaatacaggtagagtgttgtggatgcatattttaaaaactagatataacaaaagcatagagcaattacaggtgattttttcttttctcctttttctttgtattttctctattttacataacaaacaagtactgcttttgtagagaagaaaaccataaaagttaaaacaaaaggactagtttataaaatcataggactttaataaaatttggggtttattgtcaagccagtttctaatttcttctgttgaggaaactgaagcacagaaaaactcatcttcttaaatcttctaatttctcatttttgcctatcagaatactaaccatcactaaaggcactgctcacatatgcaaggcttkggcatttctaaaacagcatatgttatgtctcatcaattttaaagtttttccagtatagtcataatacttaggagggggaagaagagaagagaggagctgtgagaaagataatagcttttatgtaccacttaactgtgtattttgtgttattttaattaatccttacattaccttcatgacataaatataattcccattttgtagaataaagaagatcaaacagatacaattttacaaatcttccctgtctcaacctatagaactcagatttttacacagttctttgtgtaacttgacctacagtagatactcagtaaatattcgtttaataattgaactaatttagaaagcatttggtatgcatggaccagatttttagtgtttatcagtggactgccaattcctcactaaattcacaactgaaaaccaactttgaccacaagtagtgtgttcaagttcagatcctctaataaacagaattgttttctgtcatggaaaaaatgatcaccatttcttccatttggcttccttgttctcttcattattgtgcttcaaaatgttgaaaatggttttctaaaattgtattcattttgtttgaagcattatcacttctttttcaataccaccttttctaccatgtaccaacctttgacctgctagcttaaaatgtacagctaagtaacgatagcttattatttagtactttcacaaaaactatcatattggaaacaggtaggacagatattattactcttatttaaggatgaggaggctaattctccaagttcagtgattttcttagagttatacagccagatgaaaacacagagctaggcctcaagaagagttccccaactccagctcttgtgttctttcttctatgtcatatgactcgataatgcaaagccattctctttgtcatattgttaatggctctctataaattactctacaacttgagtttctactccattcttactggacttttttcaatcctttaattttttagtttttttccagtcaaagtttttagttgcatgaaatagaaactaactctgcctgatttaagtaggaaaagaatttgctgagaggctactgagtagctcacaaaatcatggagcagcaggttcagaaataggtgagaataagcaagaagggcatcagctaagacggctgccaaaaccatgctatagaacacagggcacttgctgggcaatggattyctttgctggtacatctggctttgctgcccctgaaaactaaatattgttatatcaactgccactgcccatttctaggatggtttctgattgtccctgcttatttgtgtcactatctcctgtttcgaagtcatgaatgagtatgtcagattggcagaatatttatcatatggtcatactctaactttagaaaaagccgagaaacaaagtttaggtatctaaaccattgtcattggaggtaagctctgtctcccatcaagactcattaagcccacacttcacctatcacaacatgaatgtttaaatcattgaaagcctcccaccagaaccaaaaaaatgaccaaattctagcactgtttccaatttagttttatacgttctttctctggtctttctttgggaatatatttaatttacaactatgactcaattgtcactcaaccaatagttacctttattttgcagcattctggaggttcaaaactcaatgtgtaagttttattcacctgctaagaaattattttttcaaagctagcctcaatatttattttaaatgagtgaacttcaaggcctgaaagaataaactaatactttacgaaatatttttgaagtataaagaatatattcaacatctttccatgtctccagattttaatatatgccttattttactttaaaaattttcaaatgtttcttttatacacaatatgtttcttagtctgaataaccttttcctctgcagtatttttgagcagtggctccraaggcaccgtcctcttcaagaagtttatccagaagccaatgcacccattrgacataaccrggaatcctacatggttccttttatamyactgtacagaaatggtgatttctttatttcatccaaagatctgggctatgactatagctatctacaagattcaggtaaagtttactttctttcagaggaattgctgaatctagtgttaccaatttattttgagataacacaaaactttatgcttcgacaatgttattcctgaacactttaaatcctgaaagtgcattataatccttaatttattaccagtttattatcacaggaatcaaattctgaggatctttaaagtcatggtcattttgcttaacataggccattttgtacatggcaaccatgtgaagagcagtagaatcagaagaagaaaaaaaaaggttttgagacatgactctatcaactgactgtaaggtgacctgggaaattcrctctacatccctgaatctcagtttattcacctgaaatactgggaccagaacacattaaagaattatttagaatgatacattaatgagcctagtacagtgtaacacagggtaaacatccagcagttttggaatcatttttggaagtttcttgctagggttaccaagaaaatttgtagaaatcttgaacttaagtgtagttaataataatagctattataatgtttattgctctatgatgacgatagtaatataaaaccccaggattagaattagatttgagctctaaataatcttcctgcatagaaccatgtcagtatcttcttgacaaaatgaggaacagatagtagtgtttccttctacctgaaagtccactacatgcatattctttacatgtattattaataaaccatataggaggtaagttttattctcctaagataaaggtgaggacactgatacccagagaatttaagtgactttctcaaaatcaaacaccaataatgtggagaagcaagatttcaattctaggaggtcctcctcatctcaccgcactgtaattcacctaacgcatgagggttaattatcaaaaacagtgtggcttatgggtaggaggtatttaacaagcattgatgtttcattgcattcattgataatgacacataaatacataaataaataaatatataaaataaacgaatgaaactcaaccctctcactcttgtgctcaaatccagtgatacatgactagcatagtttcatacctgaagaagctccagtgtggaagtaagacaattgtgcaaggaagtaaaaaacatcaggctgtgttatgtgcagtaaaagagtcataaagaaaatcccacagcagtgctgaagagaaagccatgacttttgaagggttcaacctaaaaagagaaaacaaggccttgagaatgartaagcaggtggcagatagaaaagggcaggggatatgctaggcaaagagaatagcaagaacagtagaggtggaaaatgtacagcatatttatgaaatgctgaattattctatttgagtagtatgaacagtggaaaaggacacgaagaaaataagttgacccagtttataatagttcacacatactaagtattttttattagccaggaactcttctcaatgtgccctatgcattacttccttaaatcttcataattactctatgaagtaggtatcattatttcttttgctttttcatagatgaggaaacagagtcataaagagtataaattgattttcccaggccacttacctagtatatggtayaatatatacacaatttggggctaacaggagaggctataggtcatcaaccttgttctgccctttgagggatgattaattgaaaagatatgggtttaattgaacttttctgctttatctgaagactgtagccaatgcacaaaatgctaacacagctgacaaaggagatcagtttttggaaaatcttaagatcactaagaacagagaaatttgcaaagggtggaggtgtggtaagaggaggggtttcctgtaagtctcaagtgacatgtcttctctttcttctatgaaaaccacagtacataaaaaagggagcttattggtaactatttttcaaagattttccatttaggattttatgatttagtgtctgtttccatttccaaaacacgctagactttcatgggttcatgcttttaaatatgctattgtttctgcctgaattctgactctctttctccatttgtcaaactctcagatataaaaatcattttatacttatagtgatgtttactcacgcctttctcatagttacatagcatttctttctgtgtatgaatctgtcctgggttttattcttccccaaacccccaagatcagaatttatcttgcaagcttctccattctaagcatcacattgtatctggtatggactgaaatcaataaatcagtttgagtacaagtgatatttatcatgaagtgtcatttctcttaactaatataagtgaagttttctagaaaaatgccacacctcttaatactctggtcacttttggatatatattttaaaacactataagtattctatcacaccaggtttttttttatgtgtctgtactgagttgtttattctttacayacacatttattgaataygtactttgaataacacattgccttagatactatggatacaatggtaaacaacatagtctctatcttcacaaagtttaccatggaagagaaagatcttaactgcttgctgaaaaactcatttatatagagatatgcctaactccaggggtcaatgaagtgatacttcagatgacatcaatatgacaggtagaattaactagttgaaaaggaggacatggttatgaatttgggccatattgttagaataatgcaagccactgataaattttaagcaggttataatcaaatttgaattttcaaaagattattgcagcttcagtatgcagaaaaattttagtagttggaaagcacatgcagaaagccagtgaaaatgctattataagagtctgaggaagaggtaaakgtagtttaagttgcagtggtggtggcaggaagggagacagaaagcatgattaatntgatattattttgaaggcaaaatttacagaacttggaaaattatttatatatcagatgaaggagattaggaatggctttacgctttctggcctgtgaaaatgatgaatggtagtataattcactcatataataacaagaggagcaaagaaagacatggaggaaagcttatggttttgttatacagtgaaatgaagttatatgggacggcaaggtgaatgtctcttgagaagttggatacacagcctgaaactcaaaagcggtgtctggccctcagatcctaatgcgagagacatcagcatataaattattgactcagctaatttttaaaaccccatggaagggtgatttttattctgttttacaggtaagtaaattgagactcagaaagataaagtgattaattttaaactacaaagctagtaagtgtcaaatactgaatccaaaacttcatcactccatcactgcacagagaagagggttccctttaacccctacattgtcttctacrcatatgctccacctctttgttccttccctagtgtcccaatggatactttttactacaaaggcaacaaaatttcctggatgagccaggggagaagaggctcaatgagtcatattagaagcttgaaggtatttatttccaattaaatttaaagaaacaatttacttgaaatgctttagagtaattttcacacggctttgaatttacaaagttaattttagagaagtttgactttaaaataagcaacagcagatacttgggaggctgaggcaggaggttctcttaagcccaggagtgtgaggccagtttgggcaacacagcaagactcatctctaagaacaaagcaaaacaaaacagctaaactaagtaacaccaattgcctattttctattttatgaatttttccatattgttgcctctgttgtactttcaaggagtttaaaatttatctctattcatagctaaattttaagcttactaaaaaattatttaagatttcttgatataattttgttcaaggggattattattcatcaaccaggtactcatgtttataattacttaagtggtttctgtaaaaaggcagctgatgtctgccatttatcaaactttttctcttataattgaatttagtgattctttagaaaattgagtagcaggtgattttctcatatgtataactaatttacaaggggaggccaaaaatctttggcaaagaagggttatgtcttcaatgttgttgataaatgtaatcttactttctacgtagcagaaaaactctgttgagagcttccttctccccatacattacaaaagacctggaaatttggtttcaaaaatgagaaggggaaacactgttcacagtaactgcagtrccccattctgccaatggaatttgatgacacttctatcattcatgaatttgttcaatagctctgtttggctgtgtatacctgtgtgcatgctgttcttttctgcctaggatggattgccatcaacattatatgctcagagtctaattcattcttttactcagtgggacagtcttctggggtgcattccctgacttcacagagatgtaggaagtcttttctccatgatscctttctatcttcatcagaacaacattactctcgaaatgatttgtttacctgccaggtgctgagggtgaaaaggtaaatgagacagagtgccccccaactccccgcctacaggtagtgtatctcaatgaataagtgatattttaataaatgagttgaagaaagataaaacaagtaagacataatacttgctcttgagagtttgtgacaagcttgaaaaataagacatatataaatagatataattataataaatggacgtttgtgccaaatgtcacaaggcagcaaagaaactagtttgagaatccagaagagaatggagctgagtcagcagctgaagcaagtttggaaagaaaaactcaaattgtaagctgatttaggtgaaatattgatgaaattatcattctatcatgataagaatcaacagcagttgtaaattgttttctatatggtagacattgtaccaagggctatacatacattgtctagtttaatcgctccaggcagactcctaattcatttgagtaatggcccctaactacttcatgtgtttgttttgtgaataaatgggcatgttaatgcactttggaaatgatagagcataaaacaaaaatctacataattattctgaaaagaatggatgacaagaaaaataggacttcacagagggaaggatgatcaaaaaattacgatattgggacagaacaaaaaggtgcactattggggctcaaacgcagatggcttacaaagaaagtctgaatttgaaggatgttgagaaataaaagtatctcaaagacagtcccttggtgacagtaaaaattgagaccacttggaatgaattaaagtggagcaatagtaagaraagctggagaacaggactgacatagaaatagtatttaaaagctgtgaaagcacttcagccaagcctttaacaaaaaagaaaatatttattatgtagcctctatgtatcctgcctttttttggacattttaaatgtactatgtattgaagccactaacagcaatttaagctaagtattgtagtcccattttcaaaataattttaatatatattaaaaacagtaactttcaaggtctagggtttaccctgggttatatagtccatgatggctcaccaacaacctgtctgtattctagctagtcagaaargaaaaggtaaatggttaaagatatattcttttctttttaagggaacttcccycaaagttatacatatatttttgctctagacttgagtcacatagccatgacttgctgcaaggtaagcccaggatgcactctcttctttctgctatgtcaaaaagtaaatttatagtatcttctgtgtatgttctacatatatatcttctatatgcattatagagagcatcttctataaaggaattgttttgttagaaagaatccatttgctcttactgaacagatattcagtacggacttcctcatttactcaaatcttaatagtctcctaaatagattctatagttatatttacataaaatttaaacatctctccttaactgctacgtgccttaaatatgtagttgattgtgagaatgagatttgtttttcattaaaacaaatctttccttcccatttccacagctgccattcagggacattccttcaacatatcttctgggtccaataacacattcagtcattcagtaaacatgttcattctctcatatgtgtttcagacactgtaccagattctagaattatatcaatgatgaaagcacactattggccttcaaggagccattttaatagaaacaataggttaattgttgatgtatagggaagtttaatttatgtaatacttatctagccgtattttatttttttactatgcattatctgattatggatttcctaaatatatagttatatcatctattaattgcatcaggtacttttagtagcatgctttctaattgtatcagtaaaaagactttttttttattttggaaaattaatagaataaaccaaaaataaaaatcaactgtaatcttattgttagattgatcacttgtgctgttttagtctcctgtgtactttttcttatacttttttccacatacacataagttgttaagcatatcttttaattaattttgttttatcaaatattataagcatgttattttacaagccaaagagtgctgcaagtcttataacaaaatgtttatgcccctatatcagctactgtaacccttttacctatttattctgctatattgccctgtatttctaaataatagggaaatattactatctgttaattcatcaagtttatctttggagttcctcatatttaaataatgattttaactctcttacagcttccctgttctttcattcatcttctcagtatagtattatcatatttgggggcaaatccacatctaggaattttactgtttttactactacaatattatttacagttcaaccaaatagtatgctatgattacgtttgttttcctgcattacttttctattggaattaagactttttttttcattttaaagcacccatcmctgtttataccaaattttaaaaggaactgtaamtactacctcataacatagtgmaatatgagtaatttataaattttttccctgggtgacatccttttgtrtatgtctgcccttctcattccacagctgccattcagggacattccttcaccatatcttctgggtccaataacacattcagtcattcagtaaacatgtttattctctcatatgtgtttcagacactataccagattctagaattatatcaatgatgacaatatactattggccttcaatgagtcattttaatagaaaaaatattcatataatagataactggaatataatgtgacgggtatgataatagaggaaatgctaagccagtaacatattggatgctgtctctcctcagtgccatgttcttatgtggtttgaaggaatataaataatcaggaggctaaagacttttccttgttcagaattattgtttaaatatatgtggtcaaaatctgttgttgctttttaaagtaatgtaaaacgattgaccactattcacctttatttacaataaaggaatcaatatacaattggataacattctgattactaccaagttattgttttccctggtttctgctgaaccagaaaatcgaatattgaaaagactgagtctacctgtaaggaatgagttaaggtaaagaaaaaatatgcaagtcaatacattacaaaagttgttcatccatttatggcagcagattctaaactgccaaatctccaaccatctgattgggttcctaaagccaagtcttagacatcccatgaatcattaccttttagtcagtatagcacagggatttcaactttttgtaaaggaatggcctgctagaggaatcgttaaatgtccattaaattaagtcttgtttagataattaaaacacagcaggatctgtctagttccctcatctggttggggaggttgttggtagtaataaaattattccttttaggaattttacaaactgttcatttatatgactaaaggtgtagatagggattcttatatggctactattaaatgatacatttaaattgtccaactaattatagaatcatctgttttatttgaaatgtatggcttcaggaaaattttgaatttaatttgatgtgatttatttcttaggttgctcagtatgatggcatctcaaaaacatgggcttacccatgatttttgtttggtgaatgtttaaaaacaacacaaaaagccatttatgtacacattttatgcatacacacacacayacacacacacacacacacaacccagaatggtccttaggataaacgcaagttctgattgagtaatgactatggaaattttccccgacatttagaaatgctgttctctaatgcagaggaaataatacatcattttatgaatacgttcatagragaataagatatcaaatgttcttttatgataaaggaagcaactacagaaagcttttatttgttcaaagtaacaagtggtattgatgaaaaaaaaacacacacaccaaaaaaamccaactctcccaatactacttttaaaatgaacatatcaaaactgattttcattagaatgtagttatttttccacactagttaattaaaagccaagacccagatatatatatcacaatgcaaacaattaagcttcatcatctggacaagaatgccaacttagtctctctttgtaaaaaacaattacaatttcaagacacttcatatttgccgcttttgccagcagcaagtcggcctgatgtgaatattcccatttcaggagaaacatccattctccactgctgcctgtggcaccaattattctttcaggatcaagatctctggtgaagcctcttggtttgtcggcagcatctcttttctttgatttgctgtcattagattcattgtcagataaagactttctttctttttgtaatttttttttaccaggttttttagaattaaggaatgtttcaattaactctggacaatctaaattttctgcgggttcccaagtactgtcaacatctgacgtcccttaaacttcaggaaatgctccaccttcccttttgctgtaattcgatccagtagtttttccacaaatgcttcaggctctgcctcttcgacttttttacccttttcattctgttttcttttttcctccctttttaaaattatttattattttttgcactgtagtttcatttcaggcttttggggtttttttgtttgtttgttttggttgttgttgtttgattttggcagacccgaagggctattattcttacatatatcggctcccctaagccccgcccctccaggctttactttcagagtcctgaggcctataaaggccaggcccctgccctccagcagggagtgcgtctctgaggagaaacaaaggcccagagtgcggacgctccagggtaccgcggcacagggcccactcctatgccactgcggcccggtaaccaagagcgcccccaacccccgaagccttaggacagagggacggtgcccatgcgccaaaatctgtttcaagatttaagactgtgacctctgtgaatacagagattgttcaaatgccctagggttcttgggaggctactaagattgctgagcatttgccaacattactattaatgtctgtcaaataattaaaagactggattagtgaatggttaatgatataacggtgttctattgataatcggaatagttacaacatcctttcacagaaaaagatggaaaaatcacagctaacatttaattgagtacacackatataccaggccctgaatcacttacggatgttatctataaaattcaaacgttccaacaagaggggtattattttcccatttttctgatgaagaaactgaggctttggagtattaggtgtaactttcccaagctcttacagttaataagtagtagagctggccttcaaacccaggtgtctactccaaaggactgtgaaaggatgaagatgatggtgatcgtaacaatggtggtaacaataaaaacaatgggatgtctttttatttcagacccagactcttttcaagactacattaagtcctatttggaacaagcnagtcggatctggtcatggctccttggggcggcsatggtaggggccgtcctcactgccctgctggcagggcttgtgagcttgctgtgtcgtcacaagagaaagcagcttcctgaagaaaagcagccactcctcatggagaaagaggattaccacagcttgtatcagagccatttataaaaggcttaggcaatagagtagggccaaaaagcctgacctcactctaactcaaagtaatgtccaggttcccagagaatatctgctgntatttttctgtaaagaccatttgcaaaattgtaacctaatacaaagtntagccttcttccaactcaggtagaacacacctgtctttgtcttgctgttttcactcagcccttttaacattttcccctaagcccatatgtctaaggaaaggatgctatttggtaatgaggaactgttatttgtatgtgaattaaagtgctcttattttaaaaaattgaaataattttgatttttgccttctgattatttaaagatctatatatgttttattggccccttctttattttaataaaacagtgagaaatctacattaactgactcctttaggcttcagaaacacatttttattttcttcagaaaggatgatattcccctttattttacatttctgctccaaaatacattatggacttcaaatagaaaagaacctttagctctttcctgtcatagctctgacgatattttttaaggtcactgagaacaagggcccagcgtctataacacatccagctaagtgcctgtctcaagatgtgtccattaaatattttaatgatgataactatattaacatcttttcacctcctaaaaagtatcttattagagaaagtttaaaatgcaatcaaacatttgaagtttgaacaattatctgaatattagcctttctgtagttctagtaaaataactcatttccattttcctcgcctattaagatttcaaattagaatgttcagataatcctactacttaaattttggggccctattgatttccaaaaaaagtaaaattgatattgcatttgtattatggctatgcatagcataaaagactaggatcagtgggaagaagttatagtgggcccattttagttcaataaggggaaacattgttcaatactcagagttacaaaatcaaaatggacacctttggacaataataagtggttaccactggaagtcttcacatactggattgggtggctaatttgatttggaatctatagagaaaatttaagcagtgagtctatattatctttatttaaattggctcagggttcttaccaactctccccactgtaaagcaaagttaaccatgctctataaaaagtccctattactcttccacattattttaggggttttcaccattctttctttcagcctccaaccaaattaatttactttgtccaggtgttcccagtctcttcagtttccttatacctagttgtgcttgtctgcttaggattttcaaatagtatctcagtttgactacttttgtttccagtgtcatctttgaataccatactttctctgtcccttggtggtatattaaaggcagacctactcaatccaggctcctagaaacctctctgggtctggcatctgagccctacatctctgggaaggtagttaagacgagacacacaggtttttctgaggtacctttcagtcacaagattctataactactaaaagttctgcagcatagcattctgatagtttataaatgcatttaaaaataaattgtctgaaaaatttgagctcttggaaacacctttatctgtataagactgacctaaaaatcaagaccacataattttcaaatgattactttttatttagtcccattttagatttcaaagagaggcaaatatcatcctactttacacatgtcctaaccacacacatgtcctaaccacacattttggttaattttaaaatctacaataaggaaaaatttatgattatttctgaagttatcttattaattatcagaaattccgaacagttactaaacttggtaatagagcagcagtcatcttctgactctcattagttgtcagacttaagctagcatgtctaatttctgatactgactgcaggaaaatctagcaagaagtggggagtagcacccatggacacagtggaagtctgtgggaggaaacgataaataccagggagtatatcctcaactcagtacataaccagcaaaaaagatttcaagaagatcattaacaatggtgtctgaggattagagtcaattatagatgggaattgaagctagttaaatgaagagcaagaaggaatgggaaaagaaatttgcacaatagtctgtagaagactctgaagaaggaataacggtgattgggggcacctttagtcacagatcacacatgtgggtgggtctggcttacctaacaggggccaaggtgttgtggacactgcaaaacaactatgtgtgggtcacttatctaggaatgatttgaaggcaagattttagtccagggtggtatgtttcaatcatttttgcaacacattttgaataaaagtccacctaagaaattgtcattgttactgagagggagccatataaagtcatttttttcctttgtcacaggcaattccctccatcaccgcacctcaatatagaacatcattttgtttctctagaggcttgaggtgtctatttgtataaaagcaacatctatgatgaaaccatcatcactttaactccatggttttctcaatatggcacagaaattacatgactgatatttcaaactgacagttccattaaattataatcaacattatattctatggttttgttttttactgagacctttacaaattgcttcattttatgcttctgctctgattattttccattgctacattataagccacattctgttggaaaaaaaagagaaataagcagctgctactctttttttaatctttctgtgttttgtaaaaaaaaaaaaaaagtatttttagtatccaacctttccaacaagtcaaatatgtaattctccatctgtagaaatcacatttgcaattggcacaagtcatttcagccagtgtctccagcaggctaacaactggcattagtggcagatgtttttagctttttccttgtttgtgtaggctttgattttgtgggatttctttgtcatcataaaaacggcctaactggggccacctattgtgagcttgttttggaggacatgtcagtaaaacaaagttccactccccctctgattagatgccttctgaaagctgctgaaatgcaaatgtgaaaagagttttgattttctaataaactttttattgcttattttcaaaatcatttgccattttgtacaatgtaatgaaaattaaaattggctatggaagccacttagacctcaagagctttcaaattgttcacctacttaaaacaatatgggaagaatttaagtatttttttaaagaaaggcttgccaaaattctatattgttcatgtttatcttattgttttatgagttttcttaatagcaatgtaagaaattactcttatgacttcatgttcatcttccaatttttatgtttcataatcatgattataaggcatattcttatgatttctagtttttcaattagaaataagtaacaaagatgttacaatttagtcagtagttgtgatattcaaagaactgtgctaggcactttcatgtattttaactcatttaacaatcgacatgttaccaacatgtgaataagtactattcatattgtcaagggaggaaactggctgaaatagggtaaacaccttcccaagtttacatgtctgctcagtagtttaggcaatttatcttggatttgagtttagttattcctaggtgcttcttattataaatttaattgttatattttactcaattatgttgaagtgtaataaccaactccttgctactcaatagttttgatttagctgttgtcatcattttgtttaatattgtaatgcataccttggttcatataccattttatttatctgaagttattttccaggagtaggttctctgggtaaaagcacatgaatacttttataacttttctaatggactgccacagagcttttgaaaagggttgtgtggacttaaaaatgcaaagaaaagagtctaaaaaacaggacatcagaaagaataaatgagaaaattaaaagataaataacttagaagaaagaagacatgctgcaattatctttgaggggaactgaagagccttatttaagttagagccttaacttcatgtgaatttaacatggcataggctgtgatattaagtgcatgaaggatttgagaaaatttttaacatatgtgggatctcaagtcagactctatgaatttgattcctggttcaatctctcactagctgtataaccttctgtgagttatcctacctctgtgtgccccagttttatcattgttaaaatgcatgtaataatagtactttcctcagcatgtcctgaagagtaaatctaaagcctttacagtagtgcataaatattattatttcacaagttctcatagagtatgttaactcaacatgttacctgttttaagaaagaaagataaaaatataaccacacattttgtttttcaataataattttgcaaaccatgaatagtaatgtacctatttaataaaatgatattatgataaatgtacttttaagacagagaaacatttggggactagaagtattaatcatgcaagtacatagacttctatctcataaacaaaagttggctattaaagcacctatgatgtggtactgggcttgaacccagtgcatatccttggccaagagtccctatcaggataaactcctctgagctagagagtgttggttcatttttaatcattcactcattcattcaaggaacaagtctttatagaacacctactctgtcttggcactttgctagagatacaaatgttaataagatttagtttctattcacagtgaaatcacagtactctgagaaaaaagcctatgagcaaatcattgcaaaattataaataccatcataaaggaatattccatgtcttatagaagtaatataattaatactgcaggggtacagtatcatcaggggagctatagaagatttcaaagaaaagctaataattgaatggtattcctggaagttcacaaggtagatgaggtgatcgataatctgagcaaaatgataacatgagcaaaggtaagtgccgacaagctatggctaatgggctaaatcctgcctggcagttgtttttgtaaatgaagctttattgaaacacagccaaactcattcatttacattacatatcgtctattgatgttttaatgctacaatggtagagctaagtagttgcaacggcaaccatatggcccaaagcctacagtatttactatcttgcctttgattgaaaaagtctgctgacccctggcataaaccaaatcagaaaaattcagattaggtgaagatagatcaatgtagataaaaaatcatgaaaaagagcttcaccttaacaactgagaaaacaatagttgattagggtttttgttattctactgttttgccagtttattttaaagatataaagtgctttggtgcagatatgtagatatagatatagtaacagacatacatacacacacagacacacactgaattatatgaataaggtatgtgggattttaaatattttttctgccagaaaatctacaaatttcctagatttttgttttattgatctttttattccctactgtatcagtcaattttcacgctgctgatatagacatacctgagaggtggcaacttacaaaagaaagaggtttaactggactcacagctgcacgtggctggggaggcctcacaatcttggaggaaggcaaggagaacaaatcacatcttacatggatggtggcaggaagagagagaattcgtggagggaaactccaccttatgaagccatcagatctcatgagacttattcagtatcacgagaataggatgggaaagaccttctcccgtgattcaattacctcccactggtccctcccacaacacgcgggaattcaagatgagatttgggtggggacacagccaaaccatatcactcactgttgccattaagtgtccttcctatggaacacccatctctttgtaagctcaggaacccaacccttctgaaattcctgagtttttatttcactaattttcctcattcttccctgtgtcttcaacccttcccatactgtagggtccttaatgcttcagcattcagatatgcttaacttaaaaaagaaaaatcactctccattaatagcacatgagctaaaataagttatgcacaggtgagagtttctttgaccaagaaaggccaaaataaaaaaaagctgagtttccactcagcttttgccctatttctttctatagccaagcttcttaataaggctgattatatttgtggtct

SEQ ID NO: 94302 - DNA, 305240 bp, Homo sapiens
  misc_feature (1)...(305240): n = A,T,C or G
atgctttttgtttaagccaccccatctgtgacattttgttatggcagcctgagcagactaatacagaaactcctgtttctgccttcccccctcccacaatcccatcagcagtgcaaactctgagtgaaaagaatagctcatcaagttacttaggctttgggaaatgctcgatgtcagtccctggactattgtgggacggcaatttgtcttgtctgaaacataagatgtttatttatttgtattatcttttttttttttttttttttttttttttttgagacagagtctcgctctgtcgcccaggctggagtgcagtggcgcgatctcggctccctgcaagctccacctcccaggttcacgccattctcctgcctcagcctcccgagtagctgggactacaagcgtccgccaccacgcccggctaattttttctatttttagcagagacggggtttcaccgtgttaaccaggatggtctcgatctcctgacctcgtgatccgcccgctttggcctcccaaagtgctgggattacaggcgtgagccaccgcacccggcccctatttttattatcttttaataaagcttctatttatgccttctagatggagacatgagaggcagcatgctggcttattcaggggaaagacttcacaagttgataacaaaaggctgatgttgcaagaatcaagtcatttaggatgcagctttaaccttataggtcatagacattattacacaggagtctaaatatttggaaataaaaaaattgtatgtttttctatgagcaacaatgatcaacaaattatgaagaaatataagagcttccctctattctatttttattttagagaaaaggtctcattttgttccccaggctggagtgcagtagcacaatcatagctcatggcagtctcaaactcctgggctcaagcagtcctcctgcctcagcctcccaaatagcaatgaaatccaaccctcgctctatttttataacttcaaaaatattttccctaccatctttaatgtttcaagcatggagaaaccatatctaatattttaacccaattaggaaatataattaaatgctaaaaatattaatatttataattacagttgattttttatgtttgtataactttattttcatattttatacccaaatttacacaataatattttatatttttcggtagaactattaaaatataatattaatagcacattttaaagccagttggctataaaatcatgatccaaatttccctaaatagcaatctgttatgacagcatgctaggttataatccgtcgggaagtcaagaggcggtcaacaaccatttcccacagagtacgtctaaatggtacacgttgacacataagatgtttgagacaaaaattggccacaatttctgaaaataaaaatgtccttttggttgttttcttttcttttcttttcttttttttttttttttttttgagatgcagtctcattctgttgtctaggttggagtgcaatggtgagatcttggctcactgcaacctcggccccctggggttcaaacgattcttctgcctcagcctcccgagtagctgagattacaggcacacaccacccaacccggctagtatttgtacttttagtaaagacagggtttcaccctgttggccaggctggtctcgaactcctgacatatgacccacccacctcggccttctaaagttctgggattacaggcatgagccactgcacccagccaaaagtgtccttaaatgtagtagcttctgttcctcttttagtatgatttcctaacatttgctcttgatagggaaagataaaaagatttgaatatttacctgttactaagctttgtcattaaaaactatttaatttataacttacaattagttactacatgagtctaattgcatatgaaataatttatgttttacttttgaggcagtctatagacggcagactaaatacgaagaaaattgatctaagctggtcatttttcaaatgtcaggggctgttttttcattgtcattggtttacttctatagaagagaccaaggcaaagtgaataactcctggaaattttgaaggagttatttatcaaatgattgagataattttgggctgtttgccctcagtttattatttttttttttttgcctctctcagctctgcaggatgaatttccctgaattcgctgggatgaactgatggaaaaccaggagaagccagaatatatctcatcctcccctgcctcagctactccaccacctcctcaccctcctgcccatgtctctagctcccactagagaggcccattagactccagcctctgtcacattatcctggcctctgcactctgatatcatcctacattctttatgtcaattgcctacaaatggtaatgactttctaccatttctatttgatttatcgcaccattctctctgtgcctctatcacctatatcatcaattccttactgatttcctctctgttgtattatatattcttaaagtggttttgattttctcatgtggatactaatatgtgtatgcatttgcttgtttgtttatgtcataacttatgccgtgcgttattccagaaaaggtttaaagcaatttggagaaaatgtaaaatataagaagatatatatcaaaaattaaaagtggattttttttaaagctgggtacaaggataaactaaactaatttgatgtaataatgtcaggtataaagctaaactagcccgggcatggtgactcacacctctactcccagtactttgagagggcaaggtgaaaggatggcttgagaccaggaattcaagatcagccttggcaacgtagcaagactctgtctctacaaaaacaaaaaaaaaaacaaaaaacgaacaaacaaaattacccagcaggcatggtggagcaagcctgtagtcctagctactgtgggagctgaagctgtgggatcgtttgagccagaaggtcaaggcctcagtaagctatgatcacatcactgcactccatcctaggtgacagagtaaaaccttatctctaaaacaaaataaataaataaatagagctgaaacaatgcacaaccagcctttggcagcagatggcccttacatttaactctaaactttctagtagtaagtgtaaaaagggaaacatgattagcttgaaaattcacaggtaggaagagaagaggagaaggaggaagagaaggaagtaattgtttatttaactattaggatccactgttatttgtgacatctgattaaggtacacgtaaggttttatcttttaaaattttttattttcctaaaagaaaccactcaagcattcatgtggccatctattattgtttaattcactccatatccaaccactctccaatattcctggagttgattcagtccaaagagagctttcatgatgtatcatggtcacaattggattcttcatatccaataaaactgtcagagttaggcacagctccatcagaccagacgcactcttttctcatagaaagccgtcttctttgggagctcatgggtaacttcctaacaaggacctcggtgcaaccaacactggctgtcagaatgtcctaatggcattgaatattgtatgcacaatttgttttgtagcttctaaatgatgcaaaatatttcatagtgtccacaatcacatatcttttattcatttcccaacattattttcagcacgttacatttgtactctgtacaaggatttatttgggatatacacctagaactcatttctcaggggcacagaagcccaacaggaaacaattaagatcattaagtatagacagatttatttccaaaagggtttttctcgtttatgttccccatgataataattttaaaagatttataaatattcttattttctcacatctctgccaatgttgtttttatctaattttctaatttttacctacggagactgtaaagaggtattccattgcagtttcacttttctctgactactaatgagtttgagcatttctccatataactttacatcaactatacttctttgtaaatcaactgctcatcttctttaccaaatctttaattgagtttcctttctttcctttggaagttaacatgaatcattaaagataaatactgttgatttgtgtcacctgaggtcaggagttccagaccatcgtggccaacatgatgaaaccctgtctttactaaaaatcagaaaattaggccggttgcggtgcccgtaattatgcctgtaatcccagcactttgggaggccgcggtaggcgaatcacgaggtcaggaaatcgagaccatcctggccaacagaaaccctgtctctactaaaaatacaaaaactagctgggcgtggcggggcgtgcccgtagtcccagcactcgggaggctggggcgggagaatcgcttgaactcagggggcgggagagtcgcttgaactcaggaggcggagtttgcagtgagccaagatggcgccgctgcactccagcctggctacagaggtagactccctctcagatttaacaaaaaaaaaaaaaaaatagctgggcgtcgtgtcggcacgcctgtaatctcagctattcaagaggctgaggcaggagaatcgcttgaactgggaggcgcaggttgcagtgagccgagatcgcgccaccaaactccagcctgggcgacagaacaaaactccctctcaacaacaacaacaacaaaatactattgatttgtttaggctgactttctgagcaacaatcttgataaattactttatttattgtaataattgctttttttctgttgaatttaattttattttgacaattgtgcaatcaacaaatgaagacatttttaactctacctcttcgtattagttcgttttcacactgctgataaagccatacctgagagtgggtaatttataaagaaaaagcggtttaatgggctcacagttccacgtggctgtggaggcctcacaatcatggcggaaagtgaaaggcacatcttgcattggccccaggtgagagagaatgaaaaaccaagcgaaaggggtttcctcttataaaaccatcagctcaggtgagacttatttgttaccaaaagaacagtacgtgggaaaccggcccagtgattcaattatctcccaccgggtctctcccataacacgtggaaattataggaactacaattcaaaatgaggtttgggtgagaggacccagccaatycatatccctctcatatctcaaactctttttttttttcttctctgatagttttggttataactgtgcaaaacactattgatgaaaataggcattcttttatttgtttttaaagaaactatgtttaaatgccctcaattaaatataacatttggtatagttcccaagtatataggcacattctttagggacgcttttttctaccacaatttttctgagtttttaataaaaacaagtgtgatattatttatttttcagatctattgaagtgatagtgttttttattatgtggtccttcaatgtgatgaacaatagtatacactggttaccaattattaacattatgagtagatgacaggtataattgaagtcacgttgttggctggggtaaatacccgaagttcgtcatctcacgccaaggatattaagtaggcggacacacaagaagtgggtttagaagcagaggtttaataggcaaaagaaggagaaaggagcaaagctctctctctcctgagagacaggtgccccagtgggacttctggccatcagtggagcccacagggttttatagacagcctggaggaggcggtgtctgatttacgcacagctcacagattggttggaccaggtgtgacgtttacatagtgcatgaggaaactggccaccccagcttaatctttcgttatgcaaatggggtctctacttggccagcactatgttccctgctccttactgtgcccgtgacaaggaaaggagacgatggagccgccatgttgaacacgtctagcctcaggtagccttttcctattggcacagctgcaggcattcacccttgcaagcttccagctcgctcatctatgtctgcagcttgtttttacaggctgctctttgttagataacaaaatgacttgggggctgcttttcattaaaaggaaaaccttacaatctgcctaaataatttyttcttaagtcctatatcataattttctgtcaataagtatcgttccattttaaaaataaacagtattttaaggattttaaaaattttccaacaaactgtttaattaagatagtcaaattttatttaatagctatgcatttgcatttataagattggtctctaatttcttttccttatttctccttattcttattttatgggattttatgagctacaacaaaatgagttggcaattagtcttccttttgatttttgtgaccatttgtttaatgtttttaaaacatttagaggggtagatttgaaacaatttgtctctaaaaatgtctgggcatgagattttttgaggaagtataggaatctttgtttatcatttaatttctttcatgaatacaagtctattaacattttctattgcttttttttttaccaaattctgccattctcatttttcagaaatgtatcaattgtattttattttaaaatgtattttatgcaatctttgtaacatgctttgaaattttaatattttkatattccctttattttttatatatttttcgattttctcatttattttagtaagttttctactggttccctatctcattagtcttttcaaataaacaaatttaattttattcaatttctctatttttctttgttcttggttttgctgatatttggtttatgtcttattatttatttccttcttgtttaattatgtttactttggcaatgtttttccaattccttgagttaaatgattagctcatttaatttctttctttttttccaacaaatgcattttgttataaatccctccttaatattgtgtttagataataaatatttccattgtattatgttctagacatcgtaagataacatcatttctaatttcttcttgagctcaaagatatttagcaattttttaaaaagaattcaggggaataaatttttgaaccaccttccaatttattttaaacacacacacacacacacaaatttggtatctatatgtctttaaaattaacgtatttaacctgataatattccttcaagataagcatattcattatctctattttaaagaggaggaaagtaaggcatagagaagttacataatttctccatgctgtaaaactaggaaatatcaaagttgagatttaaatccaattgatgaatctggagcttttcactagtatgatatcctaaaacaaaatcagtattgaacaatgatacagagtttctcaaaatgaaactatgataaaataatgaataggtaacagtagtaatgaaacatgattactaagagaaaaatatcttcttagatgcctcaaagataaaacatataggcagccaattccaaatacttttggtagatataaaattagaaactgtgtgacctatttaatgaatataagcatccaggggcaacagatatagttaacaacccataatgagatktcctcttggttgtttttgccaagaagataaatttccagtaaaatgtcaaacaaggttaccatttaaatagcaatgctaataattacattctgagctctcacctcaatgaatggcataatttatttattgcacatttccactgtgttaagaaaatggttttgttcctatgagggctcttgattaacatttttgaaattttgattagcaattagctttaatggaacaacttaaatcattttttatggaagggattttttgaaacaaacaaacatgattccttctattatgtagatatctgtcctgggacaccagtcatctcctgaataacactgtcagctaaaattacacaatttccagcaaaaagaaaaaaaaagattcccacggataaccgtgagttttttttctgtttgttttattagtggctggacttcagtacctacaattcttacctaatgtgtaatctctgaggtaaataaataactttaatgtacaatcttgtatgttttagtttaatatcctaagtgtagagaccagaatacacttgtgtttggcagatatcaagaaattctaaattatttgcattcatcaccatacatattaacaaattgcaaaaagatcacatgtaatagctacaaaatttattatattataagaaaaagctttcaatttgggtaagaactccaaaatagaaactatatggaaatagaaagtcagaagatcagaggctacatgtatcaaacctaacacaaatctggaattgtgttaataattagaactggagaatattagccttaaaaaagtgtccactcgcctatccaaagtaaaaacaaaaacaaaaacaaaaactaaaatgtacctaccatcctccctaaaagtttccagctgaccttttcttagtaccagtgattgaaaacttgttgaggaaagaaactttaatcatctagcttgcaatgccaagaagacttttaacctagatagtactgaataataagccagattgatagaaaatatttacaacacatttatttgaccaaaaacttttacttagaatctatgaagaacttttacaaatctatattggcaagaaaacaatcaaaaatggtcaaaagtcataaaaatatactggactaaaaaagcaacaaacgtcaataagtgcaatagtcaccaggaaatgctaattaaaccagaatgaaatgctgtttctcaccccctgaaacagctaaaccatgaaaaacagatacttctaagtatgacaactgtatggaataaataagcgtcccatatattgctcatgggagagtaaaataatatgatcactttagagacctgtttgacattttgttataaatttaaacatatatccactcaatgcccgaacaattcaactactagatatttatcaaagaaaaatgaaaacatatacttataaaaagagttattaattacagcttaaaattggaaacaacctaaatgtctatcaagaagaaaaatgtatgcatatattacagtttattcatacaatgcagggccaagaccagagtaagacaaggaaggtatgtgtgtgtatgcccataagtgtgtgtgcatgagtgtacgtgtttacataaatgtgcatatatagggacacacatacaaatatatgatataaatttattgtggctagctacataacttacaggttgcaaaatggaaaaatgaatcctcttgttcaaaaggcagaagtgtaagtgccattattgttcatttttgtgttgcacaaagctatttttaagtgccaataagagcatgtggtagagtatgtggaattactgaaattacwcagctcttatttcataactgagctatgcatatgaattttgttcttaccagaatgatggaaatgtacattaattcaaatgtatttatttcatttggatacaggcatatttaaccaatacttactaccttcagcttattgatttataaggactaattgaagaaaaaagaattatgggttgtcctatcttttcagttctttcccattcagtgtcaccatttttagcataaggtgttgactagtaaagggaagtaggactccaaagaaaggttacattagggttccttggttgcccgtgtttcgtaaaatgccattgcttacttttggcgtgaaatgtgaatggagtggcaagaaaaggcagcaaacgtgcatatttcatgtttctcttctgctaatgtgcatgctccattgtcccattggacttcacctacaaatcataagttcaaagataaaattatcaacagttttcaagatggcaacagcagaacattaagccaaacatagatccttctgaacctggaaccatttgagactatatatgtggcatatgcaaaaagccagcctttatcagttgaatacatagatgatagatagatagatagatagatagatagatagatagatagatgatagatagatagacaaatattgagatagatgaatgattgattagtctatattagcaaagcaccctttaaaaggtgatatggcttggatttgtgtccctgcccaaatctcatgttgaattgtaatccccaatgttggaggtggggactggtgggaggtgattggatcatgggagtggaattctcccttgctgttctcctaatagtgagttctcacaagatctggttgttgaaaagtgtgtagcacctcccactttcctctctttctccttctccggccgtggaacacatgactctgtcctcttcatcttctgctgtctttgtaagtttcctgaggcctccccagccatgcttcctgtacaggctgtggaatggtgagccaattaaacctctttataaattaccaagtctcaggtagttccttatagcagtgcaagaacggactaacacaaaatgtaaaagagacttcagaggagaaacatgatgagaagtaatcaaaatctgaatatatcttgatgagtcgaaagagcttggttgtgggctttatgaggaaaagataaatcaaaagtgactcaaggtttttggcctgagaaactagaaaagtagagttattatgtaatgaaatggcagtgactacaggaggaggtggtttcagagatgagagagatcagaagttcaattttggatgtactaagtttaagtgcccattatacatccaagtgtaaatgtcaattaggcagttggatatgtgagtctggagagcagggaagacatctgagctggagatttaatttgagagtagtcagcacactggtgacacgatatttaaagccgtgagaagtgagaaaagctgatgcaagaagtaagtgtagatggagaagggaaaggtgtgaggactgagccttggatcacttcactatttagagattgaagaaatgacgtgtgacctacaatggaaacttcaaaattaactttggcaaatgacttaatatctccaaacattttttagttaactgtgaagtaaggatattgatacctacttcttaggattgctggagaataaaagatacaaataatattatctaaactatccagaatacacaacaagattgccttctcattctaagtgtagtgtttcttttctctggttcatttcccgtcctttccccaaaggtctcaaaacaaacaaatagacaagcttatttatttacttatttgtatcacttctatttgctttcttaatgaccttccctactggtcacttgcccaggacaggaaacatgacttatttatcttggtgagtacattaaacacattggctcacaatgaggtttttttatactgtccaaagcaacatcacttcacagttcttaagaagtcagtacaatcaggaatctgacctataagaaacattgttttacatttcttatagttatgtttcctttaacttggtgaactaaaaataatttgagaatgaatttttcatatttttcttcttcagagctaagaagaataacagtgaaaaatttaaatatgatagcacctatgggaaataagtaactcttctaacctactctaatatctaagttgaaaactaaatgttctttggcattctgtaggacttacaaaatgtcaagatagcctccactctgattattcataaatttgaagtgcctccatttaacattcaagcttgcaaagtacctctctctggttttagtggaaaaacagagctttttacattaatgataacttatatacaattgtgttaaagggctttaactgaatccagggagaaaaaaatgtacatctaaccctattcagagctgccgaggctctgatttgggttatatatagcaaagtcaaaaaatcacataaattttagctaaatcattttcctttcttgcacagctgttctcattggctagccattgaaaagatgcaaaacttcctattatctaagagtcaaaaattgaccctaatgtttctttcagtgtttgattaaagaggtatgctctcaaagagtatgaaactgggaaatactggccgttctagggatgatgtcagaacacaaactggaaaagaagaaaccattctgaatgtataaaccagagggaatgaaatgcaaggaaccagctagattaatgatgaaacactccagaaaacaaccaggccttggctcttagatggcattttgggacatgccctggaccagagtggaagctcactgccctaaagggtgagtcccaggtcaggcagcattcamcacagaattaaattaataccacagaatttaattctgtggtattaaagggataccacagaaatacacaagttctttaaatgccactatgaacaaaatctatgagatgcctgggctggctttgcaattccactgttctaaaatatgtagtccagaggcctgaagatcatgcagtccagcagcctgaagttcatccagtccagtctactactactggcactagagcactcctcccagaggccataggttggacccacccaccctgctattactactacagctgcactcacctgcatgtactacttgcaggcctagagatgactggttaattgataatcagtgaacaggagacaataaggcaacccagagattaacaacaatagaagtccctacattctccactactacactaaagagacaaattaagaaggtggtttttaccagggatcaagaaccaggattatctagtggaatctagggctgtgttcacactgacttgtcagcacatcctttctatataggacagtgattatcaaattttatgtacataaatgttacatgagcaattgcttaaaatgcaggttcccagaactcaccaccagagattctgtttcagtagaatctagtggtattaatcccaggaacatgtaaaacaaatgycccttggtgattttaatatatgtggtcccggggtcacatttgtaagtgcatcgttcaggagagattttcatggaaggacaaatcatagcaaaactgctatttggaaagaaatcagcccaatgttgggtgagaagtgatggaatcagaaaatgttctgaatgcattaattttatgtttccattaatgcctttctcttccattgcttttcttagactctatgctgatcacattctacccctctcaaaaaaaaatttgaacttaaaggtatatactaattaggattctttaagattgcaagtaatagagacagattcaggttgcctcaggattttgtaccaagtaactgaggagtaaaaagagcaaagaaaactattttaaatgacagcacagctgcttctgtaaaactgagattgtaaaccattatttaggacattatatttaacgtcaattctggtgacccaatagaaggtctcatgacctcgtcttttttataccctcagatacatgaggtttgcacctctacttccttagtcactcttatgactcagttttcttattacctccttctttttgtgtgcctttttctctaactccacatcctcctcaaatgattcattcattgctaactctgaacttaaagctatttatctctttgcattcaaagatgcccaaaaatgttgcaatcaagtaaatgagataatgagatagtatcctatatggagcctatattsaatagaggtctcagatttgtttaggttcttcagcaagaatcatattccagtcytgctttaagactgcatgcctcaatatttcttcacatgttattaatggacagtcactcaagtaatttcagcacatgatgaattttaccaatttcattttgatttttttctaaagtccatctcaaaattatgaatacttgactgttaaacacatgtgctcaccaaatattcaatacagaaaatgaattatctgctactcaaatatttctactaaagatgttttcataatattatctgtttgcttaatctgtcattgcagatcatttatcattccaagaatctttctaagaagctagcaactgcttcactaaaacattaattaatacatactaatgatgtctgaaagatatgtagaatatatataatcatctattctttctccaatagaatagctacacaaatatttaaaagcatctattatggctctctgaagtctttttttttttttttttttttttttgaggcaragtcttgcttcatcgcccaggctggaatgcagtgacatgatcatggctcattgcagcctcgaccttctgggctcaagcaatcctcccacctcagcctcccaattagccaggactacaggaacacttcatcacacccagctaatttttgtgtagatatgggggtctcactgtgttgtccaggctaatctcaaaatcaagcaatccccccaactcagcctcccaaagcattggaattagaggcatgagccactgcactcagctctcttaaatctttttatctccagactaaattcaccaagttcctttaatctttcctcatgggtcagagttttcagacacttcattgttctgaacatacacttatttgccaatgactctgttaccttgtggtgtatagtgttagagaaaatatttcaagtgtgaatgcttagtagatgggggtccattctttatatggacatgatattggattgatacaacttactaccatgtcatgataatatttttagcggcatgatcagggtgttgacacatgctgaacttatcatggtcaacaaaacacaagactttactatgatagtacaaaggtactatcatactgtttcttcctagtcattacctacacaatcattgttttatctttactaataaaggcataaattggcatttgtttctcttaaattttctattaattttattctattactgatttttgtaagagtgatttgaaatattaaatcatttaattttagaaccaaaaatacattttcatctgcagagtcaaaataaccagagttgacaagataatctctgtagtccagagttatttgacctgccctatgcatcaattctgtagttctctaatcctatacatgggttatctaaatatcataactgtaactagtgaaactaatttggtttccagttagcattcacagccacatgcatgattctggaggaggacataatgttaagtaaaaaagttagacacagaaagataaatgctgcatgttctcattcatatgtgggagctgaaaagaaaaatttagctcatggaagtaaataatattattgtggttattagaggctggaaagggtaggggagaggtaggaagagtatgattaacagatacaaaaccataactagatgggaggagtatgttctagtgtactatagcacctagggtgaataggtgtaacaataatttattgtttattttcataagctaaaatagaggattttgaatattcacagaactaagaaataataaatgtttatggtgatagatatgccagttaccctaaattaagcattacacattgtctgcatgaatcaaaatatcactctctatcttataaatagataatttatttatataaatagataatttatttttcatttatttgtagctgacaattattacatgtcagctacaaataaaggaaaaatgtataaaaagagaaaaagacattaaatgagtataatatacagcaaaaagtggaacagaatgcatatgactctttgagctgtagaatatatattctaccatatatctcgatcacaacagatgaatgaataaacataatagggcatatacatacaatggaatagtagcagccttaagaagtaaaaacattctgagacatgctaaaacatagattaatcttgaataccttatgctaataagtgaaataagccagtcacaaaagacaaataatgtacagttctactcatatgaggtgcttaaagtcatcaaattcatggagacagaaagatgatgattgccagaggatggggtcatgggtaatggggagttgtttaatgagtatgatgcttcagttttgctagacgaaaaatagtctgtggatggataatgatggtgagtgttgcacaacaatgtcaatttacttaatgctactgaactgtacaataaaaatggtaaaaatgataaatttcatgttatgtacattttaccagcgttttcaaaaatactcttctagacattggcctggacaaataatttttattaatagctcaaagcaaatgcaacaaagttaaaaataaacaaatgcgattcaattaaacaaaagagcttctgcatagcaaaagaagctctaaatagaacaaacagacaaccacagaatgggagtaaatatttgcaaactatacattcaatgaaggacgaatatttgaatttataaagaacttaaatgaatcaacaagaaaaaagcaaagaactctgttaaaaagtgggtaaaggatataaacagacacttctcaaaaggcatacatacagccaagaaacatttaaaaatgctcaacatcgctaattatcaaagaaccacaaatcaaaaccacaataagctactatctcacaccagtcagaatggcaattattacaaagtcaaaaataacagaagatggcaaggctgtggagaaaaggtaatgcttatgcacttctggtgagaatgtaaattagttcagccaatgaggaaaacagcctggagatttctcaaagaattaaaaatagaactaacattagacccagcagtttcactactgggtatatacccaaagaaaaataaattattctaccaaaaaagatatattcacttgtatgttcattgcagcattattcacaatagtaatgacatggaatcaacctagatgcccatcagtgggtgtgctggataaagaaaaattggtacatatacataacgggttactatgcagccatgaaaaaaaaaagcaaaatcatgtcctttgcagcaacatggatatagctgctggctgttatcctaagcaaattaatgcagaaacagaaaaccaaatattacatgttctcatttataagtgagccgagatcgtgccactgcactccagcctgggcgaaaaagtgagactctgtttcaaaaaaaaaaaaaaaaaaaaaaaamcttcctattgactatgtgatgggatcaataaaacccaaactaaaaaaataacttccctatctaactatgtgatgggatcaataaagcccaaacttcagcaccacacaatatgccctcataacaaacctgcacatgtacccccgagtctaaataaatatggaaattaaaaatactactaataaataaataataattgaagccacatrgtggcttatgcttataatcccagcaatttcagaggccaaaatgggaagattactgcttgaggccaggagttcgagactagcctaggaaatatagtgacagcctgtgtataacaaaaaaaaaatctgaaaattagccagttgtagtggtggacacctgtagtccccactactcaggaggctgaggcagcaaaatcccttgaacccaggagtttgaggctgcagtgagctgcaattatgacactgcagttctggcctgggcaacacagccagatccagtctcgaaatagtaataataagaaacaatttttaaaaataaaactacaattaagctgatatctgacatgttagaatcaaatcatgttcttaattttctttacacctttttaaggtatgatctttccatggcatgatctaaaaccatttttcttacacttggtttaaggacttcattacactcttcaaaattattgaggggacttctgtatctggtcaagatggaaacaggtaaatccactataaaatatctttttggccacaaaacaagtcacaataaatttaaaatcatataaattatattctcttactaaaatggagttaaattagaaatcaataactaaaagttatctgaaataccccttaactacttgctaactgaacacttattaacatcccatggtttgaagaagaattgaaagagaacattagagagtattttgaacagaatgaaaatggaaacaaaatatactaatatttatagatacagctaaaacaatatttagagagaaatttatggcactaaaacacacacatttaaaagaaaaaaagtttcagcttagcttctaccttaataatagagaaaacaacatactaaacccaaagtaagcagtcaaaaaaataaaataaagacaaaaaataaagaccaaaaaaaagatgaagtagaaaacagataaaaacaatagagcaaagtcaatgaatttgtttaacttttaaaaaagtaagaaaactccatccagactaatcagaaaagagaaaatatgctaattaactatgtcaaggttgagataggtgatgtcaccaaaaaactgacagatattacaattacaactttatgccaatgaatttgacatcttagataaaattaacagtttcttaaaagacataaattactaaagttcacttcagaacaattagataacctgcatatttctatacccatacaatcactgccccacctaaamtgacactacatggtggcctggggatcatcccatcactgcctactacagccattacctgcatgtaccaccataggacctaaggaaaagaatgcctgagctggctttgcaatccactgttctaagatatgcagtccaggggcctgaagatcatgcagttcaggggcctgaagttcatccagtccagtctacccctactggcactttagcactcctcccagaggccgtaggttggacccacccaccctgctattactactacagctggcacccaattscatgtactacctgcaggcctagaggagacttaaaatcccatcacagccatcaccaacaccagcaagcaccactcaagacccagtggtcactgcyactgacatcactcatgccacacctgcggtccaggggctgtaaagctgctcatccatctggcccatcactaccactaataccttctgagcaagccacctggaggcctaagaattgacctacctggatgtactaacactgataccagcatatgtcactctggtgcccaaggacagacacagtcagcccactgttgccaccactgggactcaaagtctggcccacctagtgccccagtccccaacaaagcttcactacagccaccactaaaaactgtaccctatcccaccaaggaaatcacagacaccacagatgctatttacatctgagaaatcatgcagagactacactactcatgcacctagaatcaaagacaaagtgccatatccagygaacaccatagatacatcttcaggaaaaagtcttcctctactaaagcaaattcaaaaaatagggagaaatgactgtttcaccagatgctcagatatcaatataaacacacaagaaacataaaaaggcaagaaaatatgacaccaccaagtgaacacaataattctccagcaacagatcccaactaaaaataaatttatgaaatcctggaacgagaattcaaaatattgattttaaagaaagtcagtgagataaaagagaatgctataaacaatacaaaagtcagaaaaccaatttagaaagtaaatgggaaattagcaaagggatagatattatttaaaagaatcaaacagaaattctggaactaaataattcattcaatgaaatacaaaatatatttttaaacaacaacaatagatgagatcagtcagaagaaataatttcagaatgtgaagacaggtcttttgaaataacccagtgagacaaaaaatggagacctgggaatcatgccatccctgcttaacacagccagctcctatatgtataccaccagggtgccagaggacaaaacacacagcctggctttgcaactcctttgtgccaaagcatgctgtccaagggccttggaattgcccagcccaggctactactgagaaaaaagaattaaaaaattaaaaagaacaaaaaagaatgaacaaagaccacatgaaatatagaatatcataaagtaaccaaatgtttgaattcgtggagtcccagaggctaagagaaagcactagtgttagaaaacattttttaaaatacattaaaagctttccaagtctagcaggagatttagacatccagatataggaggctcagagacccccaaatgaatacaatgcaaaaaggtcttctccatgatatattatagtcaaactgtcaaaagtcaaaaccaagaacagaatactaaaaacagcaaaagaaaagcatctagccatctataaagaaatcctccttagattaacagtggatttctcagcagaaaccttacaggccaggaatgaatgggatgatatatttaaaatgccaaaagaaacaactggcagccaaaaatagtatattcaggaaagttactcttcatgaatgaagaagaaataaagtttttcccagataagcaaaggctgaggcaattcattaccaatagaccaaccctactagaaatgcttcaggaagtcctacacctggaattgaaaaaatgatatctactatgaagaaaacacacgaaaaaattgtttcaaacactggtagagcaaacacacaaggaagaaagagaaaagactctaatgttagcattatagaaatcactaaatcacaataataaacaataaaagagagagaggagaaaaaatgttatataaaaccaccagaaatcaattaataaaccacaagaactaggccatcagatattagtaataaccttgaatgtaaacagattaaacttgccactttaaagatagattggatgaatgaattatcagccatgacccaacaatattctgcctacacaacacatcccacttgtaagatacatatagagagaaagtaaaaaaatggaaaaaggtatttcatgcgaacaaacaccaaaaccagcaggggtatacttatatcagataaaacagactttaagtcaaaagcagtaaaataaaatacaagaaggtcattatataacaataaagagatcaattcagcaatagactataacaattctaaacatatattcacccaacaccagagtacccagatatataaagcaaatattaccaaatttaaagggagaggtagactccgatacagtaatagtgagggagttcaacagcccattctcagccctagacagaatatctaggcagaaaattaagaaggatgcattggatttaaactgcaccttagaccaaacagatatttacagaatatttcatccagcagctatggaatacacatttttctcatgagcacatggaatattctccaggataggaaatatgttaggccatgaaacaaggctcaacaaattttaaaaatcaaatgaaatatattttcagatcacaatggaataaaactataaatcaataacaagaggaactttgaaagctgtataaatgcatggaaattaaagcatatgttcttgaatgactattaagtcatctaagaaattaaggagataattttaaaaattcttgaaacaaatgaaaattgaaacaatacaggaaaacctgtgagatatagcaaaaggagtgtgaagagsaaaatttatagcaataaaaacactgaatcaaaaaagtagaaaattttaaaataagcaatctaacaatatacctcaaggagctagaaaagcaaggacaaaccaaagccaaaattaatagaaggaaagaaataataaaaattagcacagaactaaacaaacaaacaaaaagactaaaagaacaaaagttcaataaaatgaaaagttggttttttgaaaagataaacaaaaccaataaaccacttgctatactaaacaagagagagagacccgaataaacaaaatcagaaatgaaaaaaggagacattacaactgataccacagaaatacaaaagttctttaaataccactgtaaacaacaatatgctaacaaactggaaaacctagaagcggataaattcctgggcacatacaacctactatgatggaaccaggaagaaacagaaaacctgaacagactgatatgagtaatgagattgaattggtaataaaaagtcttccaacatagaagggttcaggactgaatgacttcactaacaaattctaccaaactttcaaggaagaataaacaccaattattctcaaactattctaaaacattgaaagagagaattcaccctagctcattctacaaggccagcatttctatacaccaataatgatccagctgaagaccatatcaagaaaccaattctatttataatagctaaaaaaataaaataaaatacctgggagtaatttaaccaaggaagtgaaagatctctacaagaaaagctataaaattctaatgaagttgaagaagataaaacaaaaaacaaatacatcctatgctcatggatcagatggattaaaattgtttaaattatcatactgcccatagaaatctacatatttaaatgcaattcctattaaaataccaattccattttacacggaaatagaaaaagtaattctaaaatttgtaagaaaccaaaaaagagcccaaatagtcaaagcaatcctgaggaaaaataaaaaagctggaggtatcatgctaaccaacttcaaaatatatcacaagactgtagtaaccaaaacagcatagtattgatataaaaacagagacacatacatatagatcaatggaataaagatagagtctagaaataaatacgcttatttgcagccaactgattttttacaaagatgccaagaacatgcattgaggaaaggatgccctcttcaataaatggtgctggcaaaattggatatccttgggcagaaagataaaactggacccctatctttcaccatatacaaaaatcaaatcaaaatagattaaagatttaaatgtaagacctgaaactatacaatgacaagaagaaaacatatagagaaaaaacttcaggacattggtttaggcaaagattttgtggctaaggccttaaaagcatagataacaaaagcaaaatagacaaatgagactttattaaactaaaaaatttctgtgcaacataggaaaaaacagaatgaagagataacctgttgaatggaagaaagtatttccaaactgtttatcaaataagagactaatatccagagtatgtaagaaactcaatagtgtctataaacaaataatcccagttaaaaatgggcaaataatatgaatagacatttctttaaaaaagttgttttggccaagtgtagtggcccacacctgtaatcctggcactttcggaggcagagatgggtagatcacttgaggctaggacttggagaccagcctggccaacatggcaaaaccccatctctactaaaaatacaaaaattagccaagcgtgatggtgcatgcctgtaatccaagctattcagaaggctgatgcatgagaatcgcttcaacctgggagacagaggttgcagtgagttgagatcacaccgctgctccagactgggtgacagagcaagactctctctcaaaaaaaaaaagaggaagaagaagaagattgtattaagccattcttacattgctataaagaaatgtctaagattgggtaatttataaagaaaaaaggctcaggattctgcaggctgtacaagcatgaaagtggcatcttctcagcttctgggagtcctccgggagcttttaatcatggtggaaggtaaaacaggaggaattgtctcatttggcaagagcaggagcaaaagagggagagtgagcattaggtgccactcactaacctgagctcactcatcaccaagaggataatattaagccgctcatggggaatacacttccatgatccaaacacctcccagaaggtcccaactccaacactgggggttatattttagcatgagatttggtagggacacagatccaaaccatatcaaagatacaaaaatggccaagaagtagatgaaaaaatgcccaacatcattaatcatcagtgaaatgcaaaccaaaaccacgagatatcatcttatcccagttagaatggttatcattaaaaaggcaaaaaaacagatgctgatgagcctacagagcaaaggggactcatacactgttggtgggaatgtaaaatactgcagccactatggaaaatagtatggagatttctcaacaaactaaaaatagaactaccatacaacccagcaaccccactattaattattcaaaaaaaatcattatacaaagggatacctgcactcacatatttactgaagcactattcacaatagcaaagatatggaatcaaactaagtgtccatcaatggacaaatggataaagaaaatgtggtatccatacacattggaatactatttagccataaaaaatgaaatcatgtcagtttcagcaacatggatgggattggagggtcattatgttaaatgaaaaaagctgggcacataaagacaaacatgtcatgttatcagtatatgtgagagctggaaaagttaatatcatgtaggtacagaatagaatgatagataccagaggatgagaaggatgtgtaggtgacagaggcaatgaagagaggctggttaatgggtacaaatctacaggtagatagaagatgtaagttccaatattgatggcatagtagtatgactatagttagatacaatgtattgtctatttcaaagtagctagaataatggacttgaaatgttcccaacacatagagatgatatatgctcaaggtaatggatactccaaattccctgacttgatcattacacatcctgttcatgtaagaaataatcacatgtactccataaatatgttaaatatatatatcaataaaaataataaatatatttcaacataaggaactaaaacaatttgtcatatcagcagaaaaaagcacatgataaaatttaaaaatttaaggcacatggcaaaatttaaaaattttaaaaatatttattagcagaatagtaatagaagaaacttcccaacccaatacagagcatctgtataaaattcacaggtaacatcatacctactggtgaaacactgaaggcattcctcttaagagcagaaacaaatcaaggatgtccatctcatttctgctcaatatttcattgaaatgtatagcgattgtaataagtcaagataaagtaataaaatgtgtttaaattggaaaggaaaaaataaaactgtcttttttatagaagaaatgattgtatacatgtaagatgagtaaaataatgaataaaatctacaaagaagctgctagaactaagaagtgatattgttaaggttggaggatgaaaaattcatttaaaaagtcaattttatgtactagcaacaaacaattggaaaataaattaaaactgaaatggaaagtatgtatacaataacatcaaaaaatgaaattatagtacctgccaatataatagtttattaggacaaattatatttactaattttttaaaacttgaaatagaaagtttctgacaagggataattgagcaagatatgtgaaataatgcacttaaaagtacaaaatatttctgggagaaattatagaaattgtagattatttgattttgtggacacatagtaggcatatctatttgtggggtatttgagatattttgatacaggcatgcaatgtgtaataatcacatcatgggaaatggggtattcaaccccacatgcatttatcctttctgttacaaacaattcaattatacttttttagttattttaaaatgtacaattaaattattgattatagtcaccctgttgtgctatcaaatactaggtcttagttatggtttctaactcattttttgtacccattaatcatcctcagctcctacccacctccccactaccctccccactacccacctccccactaaccacctccccactaccccactgcctcttatgaccctcattctactgtctccatgagttcaattgttttgatttttacatcacataaatgagaatgtatgatgtttgtccttctgtgtctggcttggtttatttaacataatgacctccaattgaatccgtgttgatgcaaatgacaaaatctcattttttatggattaatagtactttctttatccagtcatctgttgttggacttgggttgcttccaaatcttggctattgtgaacagtgctgtagcaaatatgggagtgcagatatctcttcaatatactcattttctttcttctgggtatctctccagcagtgggattgctggatcatatggtatctctatttttagttttctgaggactctccaaactgttctccataatggttgtgctaatttgcattaccaccaacagtgtactagggttctcttttctttacatcctcatcagtatttgttattgcttggttttggatataagccattttaactggggtgagatatctcattgttgttttaatttgcatttttctgatgatcagttatgctggatgccttttcataagcctgtttgccgtttgtatgtcttcttttgagaaatgtctattcaaatctttggacagttttaaaaatcagattattagatttttgcctatagagttgtttaagcatcttatatattctggttattaattttttgtcagatggatagtttgcaaatattttctcactatggtttggatccatgcccaaatcttttgtccaattgaaatccccagtgttcaaggtacggcctggtggcatgtgattagatcatagaagcagttctcatgaatggtttggcaccacccccttggtgctatattctcatgatattgtagtgagtaagttctcatgagactggttgtttgaaaatatgtagcacctctccccacacacactttcctcctgctctggccatgtgaggtgacttctccctcttagccttctgccataaatgtaggtttctttcctgaggcctctccagaagccaagcagatgatgctatgcttcctgtacaccctgcagaactatgagccaattaaatcacttttctttataaattactcagtaattactcatgaaaggagtggggcattgctataaagatacctgaaaatgtggaagcaactttggaactgggtaattgttagagattggaagaggctggaggggtcagaagaagacaggaagatgaagaaaagtttggaacttcctagagactggttaaggtgttgtgaccaaaatgctgatagtgacatgggaagtcaaggccaggctgatgaggtgtcaaatggaaatgagaaacttattgggaactggagcaaaggtcacttttgttatgtcttagcgaagaacttggctccattgctcccctgcactagggatctgtggattttgaacttgagaatgatgatttaaagtatctagtagaagaaatgtctaagctgcaaaaagcatacaacatgtggcctggctgcttctaacaacctatgctcacatgcttgagcaaagaaatggcctatagctggaacttatatttaaaggggaagcatagtgtaaaagtttggaaaatttgcaacctggccatgtagtagaaaagaaaagcccattttcaggagaattcaagcagactgctgagcaaccacttgctacataaatctgcataactaaaaggaaggcaagtgctgatagtcaagacaatggagaaaaggccttgaatgcatctcagaggacttcatggcagccccttctattataggcctggatgttttggaggaaagaatggtttcatgcactaggcttagggtcccactgccctgaatagcttcaggacattgctccccacattctggcgactccagcctcagcacaaagggtcatagatacagcttcagccactgctctagagggtgcaagccataacccttggcagctttcaggtactgtttagcctgtaggtgcacagagtataagagttgagacatggaagtctccacctagatttcagaggatgtatagaaaagactggatgtccaggcagatgtctgttgcaggggcagagccctcactgagaacctctactagggaagtgtggaggggaaccgtgaagttgaagcccctacacagagttcccactggggcattcgctagtggagctatgagaagagggccaccatcctccagaccccagaatggtagagtcaacagcagccgatacccctcagactagaaaagccacatgacttatatgccaatgttgaatgtggaaaaggcctttgtagggggcagaaccctgtaaagccacaagggtgggctgccaaaggccttgggagcccactctttgtatcagtgtgccttggatatagaacatggagtcaaaagtgattgttttggagctttaagatttaatgactgccctgctggatttgatttgcatggggcctgtagcccctttctttgggctgatttctcccttttggaatgggagtatttacctaatgcttgtaccaccactgtatcttagaagtaaataacttgattttgattttataggatcatagatggaaggagctagcctcgtctcaaataagactttagacttttgagttaatgctggaatgagtttagattttgggtgactgttaggaaggcatgattgtattttgcaatgtgagaaggacatacgatttgggaggggccaggggcagaatgatatgtttgtatctgtgtactttctcaaatgtcttgtcaagttgtaatcctcaatgtctgaggcgaggtctggtggtaggtgattggatcacaggggcactttcttaataatggtttagaatcatccccttggtgctgttctcatgatagtaagttctcatgagatcctgtcagttaaaactgtgtggcacctgcctctctttttccctcctgctctggccatgtgtggtgcctgctcccatcaccttctgccatgattataagttttctgaagcctctccagaagccaggaaaatgcctctatggtttctgtacatcctgcagaactgtgagccaattaagtctccttttttaataaattaaccaggctcagttatttctttgtagcaaagtaagaatgaattaatatactgtgcattgtctcttcactttgttgattgctttctttgctgtccagaagatttttaactggatgtgatatcatttgtccatttttgctttggttgtttttacctatgggaaattactctagaaatttttgcccagttcaatgtcctggatagtttccccaatattttcttgtagcagttttttagtatrgggtcttagatttaagtctttaatccattttcaattgatttttgtatggaaagagataggggtctagtttaattcttccataaatggatatctagttttttcagcaccatttattaaaaaggcttttttttttctccagtatatatttttggcacctttgttgaaaatgagtttactgtacatgtgtggatttgtttctgggttctctattctgttccattggtctgtgtctgttttatgccatttacatgctgttttgttttctatagctctgtagtattataatttgaagtcaggtaatgtgactcctctagttttgttattactgcatagggtaagtttggctattctgggtattttgtagttcaatataaattttaagttttttttttctatttctgtgaagaatgtcattggtagagattgcattgaatctgtagattgctttgggtagttgaasattttaacaacattgacttttccaatccatgaacaggaaatattttttcattttttggtcccctctttaatttctttcatcactgttttatagttttttattgtagagatctttcccttattttgttaattcctaggtatttaacttgattgtagctactgtaagtgggattacatttttatttatttttcagattgttcactgttggcatatagaaatgctacttaattttayatgttgattttgtattttgcaactttattgaatttatcagttctaatgttttcttgtgtgtgtgtgtgtgtgtgtgtgtgtgtgtgtgtgcatctgtagtctttaggcttttccaaatatagtatcatatcatctgtgaacaaggataatttgactttttcctttccaatttagatgccctttgtatttttctcttgtctaattgctcttgctaggacttctgatactacaatgaatagcagtggtgaaagtgggcatacttgtcatgttccagatcttagagaaatgattttcattttttcaccattcagtgtagtactagcagtgagtctgtcatatatgacttttattatgttgaggtatgttccttttatacacagattttttagggctyttatcctgaagagatgttgaattttaacaattgcttttttagcatcagttgaaataatgacatggtttttgtccttcattctattgatatgatgtatcacattgattggtttgtctatattgaaccatccttgcatccattggataaattcaacttgatcatgatgaatgatctttttaatgtattgttgcatgcagtttgctaatattttgttgaggatttttgcatcaatatttatcagggatattggcctgtagttttcttttkttgatgtgtctttgtctggttttggtatcagggtaatactgggcatataatgagtttggaagtatttattcctcctctattttttgaaatagttggagtaggattggaattagttcttttttaagtgttttatagaattcagaagtgaagccatcctgggcttctctttactgggacactttttattatgacttccatttcattaattgttactggtctgtcaggttttcgatttcttcatgcttcaatcttggtagttgtatagtcgataggaaacttgttaggcaggaacgtgttcatttcttctagattttccaatatatggcatatagttgctcatagtagccactaatgattctttgaatttctgcagtatcagttgtaatgtcattttttcatctctcattttatttatttggatcttttctctttttttcttagtctgactaaaggtttgtcaattttgtttaacttttcaaaagaacagctttttgttttattgactttttgtattgttctgttcatttcaatttcatttatttctgctctgatctttataatttctttttttctactagttttgggtttggtttcgttttgcttttctaattctttaagatacaccattatgttgtttattttaggtttttcttctttattgatgtaggcacttacatctatatactcaattctgagtactgctgttgctatatcctataggttttggtgtgttgtgtgaaattacatcatttgtttcaattttttttttcaatttttaaaaaatttcttcattgacccactggccattcaggagcatactgtttaatttctgtgtatttgtatagtttcccaaatccctcttattattgattttagttttatttcattttggtcagaggagatgcttgatattattctagtttttctgaatgctttaagttttgttttctaacctaacatatagtctatacttgagtgtaatccatgtgctgagaaaaagaatgtgtattctacagccactggagaaaatattctgtaaatatctgttaggttcatttggcctaaagtacaggctatatctgatgtttctttgtttattttctgtctgtgagttttactcattgatgaaagtgggttgttgaagtctccagttattattgtattagaggtctatctctctttttagttctaataatatctgctttatatatctccaagtgttgggagatatatttaaaattatttaaaattttatattcttttactaaattgacccatttatgaatatagcgaccttcttggtcaattcttcatagtttttgtcttgaaatctattttgtctgatataataatagataattctgcactattttgatttctattggcatggaatctcattttccattcctttattttcagtctatatgtgtctttatagataaagttcagttcttgtaggcagcagatcatttggtcttttttttaaaattcattcagccatgtaggtcttttgattaaagagtttagttcatttacatttaatgttattattgattactaaggacttactcttgtcattttgttatttgttttctgcttgtttcgtggtgttctctttcttctttctttccttcatgtcttccctttactgaaggtgatttttctctgttgatatgatttaggttcttgcactttattttttgtgtattcaaggtatgttttttggtttgaggttaccatgaggcttgcaaatactatcatacaaaccataaaaaccattattttaagctgatattcacttaatgctgtttgcataagcaaaaagaaaacctaataaaaacccctgtatcttaacttcatctccctgttttttgagtttttgttctttctatttgtattttattgtactgcccatgtcttcaaaaattgtagttgctatttttgattggttcatcatttagtctttctacttaagataacagtaatttatacaccagttacagtgttataatgttctgtgttttttgtgtgtagttactattaccagtttctattataatctgtttgttaaatttatctgatagaattctgaatttctttcctgtgttatcttgaatttctatgagtttcctcaaaacagctattttgaattctctgtctgacaggtcatatatgtttcttcagagttttgtaccttcggataatttcttactgctaattaagatctgtttctttctgattgaagtacttcctttagcaattcttgtagtacargtctggtgttattgaaagccctcagcttttgtcagaaaaagtgtttatttaccttcatgttttaaggaggtattcaccagatatgctattttaggtatagttttttttttcttaatcgctttaagtatgtcatactggtctcccctggcctgtaagatttcygctgaaaagtctgctgccagatgtattggagattcattatgtgttctttgtttcctttctcttactgcttttagaatactttttttttaactttgggagtttgattattcttattattatttgatgcagggtctcactttgctacccaggctgaagtacagtggtgcactcatagatcactgtagcctcaacctcatgggcttagggaatcctctggcctcagtcccccaagtagccgggactacagacatgtgccaccatgcccaactaacttctgtattttttgtggaggtagggtttttacaagttgcccaggctggtatcaaacttctggactcaagtgacactctcaaagtgttgggattataggcatgaaccacaatgcctggtgaagacagtcttctttgagttaaatgctcttagtgtcctataacattcttgtactcggatattgatatcttcctctaggtttggaaagttctctgttattatccctttgaatgaaatttctatctctatttctttctctacctcctgtttcaggcaaagaacccttagatgtgcccttttgaggaaattttctagatcttgtaggcatgctttatcatttttcattatttttttagtctcctctgactgcattttcaaatattcagtcttcaagctcattaattctttttctgcttggtcaattctactatcaaaagattctgatgtatttttcagtatgtcaattgcaattttcagaatgcaatttcagaatgtcaatttgcaattttctataatttgtttcattctttttaattatttcaatctctttgtaaaatctatctgattgaattccagatttcttccctgtgttatcttgaatttctgtgagtttcctcaaaacagctattttgaattgtctatatgaaaggtcatatatctgtttctccagtattggttcctggtgctttatttagtacatttggtgaggtcatgttttcctggatggtcttgataattgtagatgttcatctgtgcctggacattgagtgttaggtattttttacagtcttcacagtctgggcttatttatactcatccttcttggaaaggcttttcacacattcaaaaggacttgggtattgtaatctaagctgtatctgctttaggggacacctcaagccaagtaacttcatgattcttgcagaattatagaggtacaccttgtcttgaatgggatctggatgaattttttggattatcaggcggagagactcattctttctcctaactttctcccaaacagacaaagcttctctctgttctgggccacctgaagcctggggtgaaatgacacaagcatgcctgtggccaccactactaggactgtgttgggtcagacctgaagcttgcacagtgctgggtctcgaccaagacctgcttaaccactccctggctactgcctatgttcactcaagaccttgtggctctactatcagcaggtggcaaagccattaggcctgtgtcttttctttcatgatggcaagttcccccaggccccactgaggtccagaaattctgtctgagagccaagaactagaactagagccaaaactttagatatttacctagcgttatattgtattgtggctgtgctgctactcaaatcacaagatgcagttcctcccactcttccctcccctttttaaaggcagtaacacctcactccatggccactgccaccacaggcccacagggagtactgccagactaatgctaatgtccccttaaccattttcccatttaggaaaaaaaaaaaaagtgcagctctctgccagagctcatttaactttacataaacatggtcgttggggctgaagcaaatctgactgattttcaatataaaaataaaatataaaaactgttcttgaagttatttctaaacagaacatcagaaccatctgaatcatcagaatcatctattttggaaaaatcggattcatcaaatgaatcttcagccaacaactgttcgagaaagatgttagcatcaccataggaatactacattttataggatttgacattttcagcaatcgagaattactatattttgtaaatggaaataccactactaaaaacagaatgctataaatagaatgatgtctttgtttccaaagtcaatacactaaagtgatgtgaacataataaaagtgcagtatttcatgacaaagttatctttgggtaaacactgtagccacaagtgccactagtgagtattcttggggcaaacagaaaaaaggttatggcccttgggctcttaagtcatcttgtggtgaatgctgcctgacctgggactcacccttcagggcagtgagctcccctctggtccagggcatgtccccaaatgccatctaagagccaaggcctggaatcgaggaccccaagagcccgttagagccccagagctctaatctctgtggccaagctggtatgtaaggtgcaagacaaagtcttctgcacttttacctctgcttttcccaagcagaaggagtcttgcctcattatcaccactgctgggaatgtgctaagtctcacctaaagtcagcaagtcgcagagtcttccccaaggcccacaatctgctacctgggtatcactcttagttattcagggcccaagagctctttagttatcaggtaatgatttctgccagaactggatcattccgttcaaggcagcaagttctcttctggcccagggtttgtctagaaatgtcatccaggagttagggcctcagaagggcaccttgtgactctaacaggtgccctatgctgctgtggctgagccgctatccaaagtgcaagacaaaatcctccccattcttccttctcctctcctcaagcagaaagaaggggtctattttggagctacaaacgatgcagcctgggcttacaggagggatgatttcagcactcttttatctgccctagcttgtgtctcagtatgtcatatgacccctcagttcactggctctgggtccagttcagcacttcgacttatctaggagttgcagttcttgttgcataggctgcctttcaagtttatttggtgaccaacagcactttagcccacagtagcaaggcttgtgggaattcaagttccaaccactaggaccagtgattcccctctgtctagggtaggcttaaatgctccctccatgggtgggcatcagctgaatttggtccagtcttactttttgctataacagggtagcactaagttcaatgcctcacatttggttgactccccctcccctcagtacgcagaatcacgctctgcaccttgctgccactgctggggtatgaccgaggggtagcattggtgattcaagactgtttttcctgcttcttcagtgcatctttcatatataaaagttaaaagcaggtactatgagtgcttacctgatttttggttcttatgaaggtgcttttttttatgtagatagttgttaaattgatgttcttgcaggggggataattagtggagccttctattgtaccatcttgctctactcttctctccagaagtgttaaataatggagaaatgtattgtgttcatgagtccgaagattacatatggatgtaatttctgccacaaattcagtacaatcccaatcaaaattttcgtaggcttttttttgggtagatattgattgctgattctaagatgcatatggaaatgaaagtagccaagagaaactcaagcaacttttttttaaaaagaggaaagtttaaggtctaatcctgtcttattatttccagacttattaaaagctactataatcaggatagtgtggcattggcatgaatataaacaaatatttcactggaacagactatattatccagaaatagactcacacatattttttcaactgatatcaacaaggcaattcattggagaaatgatgtcttttataaagggcagtagcaattgcatatccatatttttaaaatcaactttaattcttcttttacaccttaaacaaaaacaaactacaaatggatcttacacctaaatgcaaaactttaagcttggaaacttctagaaataaaacaaagtagaaaaatttatatgcttttggtttaggtaaagacttattagatgcaacaagaacagcaggattttttttttttttttttttttggttgagggggacagaatttcattcttgtttcccaggctggagtggaatggggcgatatcggctcactgcaacctctgcctcccaagtacaagccattctcctgtctcagcctcccaagtagcttggattacaggtttgcaccaccattcccagctaatttttttcatatttagtagagatggggtttcaccatgttagtcaggctggctgcaaactcctgacctcaggtgatccacccgcctgggcctcccaaagtgctgggattacaggcgtgtgccacacgcccagccccattttttaaaatgttaaatcagaccctatcaaaatttaaaaacttctgtttcttcaaagatactgttaaattcactttcagtagaaaaacattgagaaaaccagccactctctgagacaaaatagtagaaaaaatattatgtatctggaataaataagaactctcaaaatttattgctaagaaaacaagtgactcaataaagaaattatttataacttacaaagacacttcaacaataaatatatgtagtgtaaaaataagcacataaaaaacattctcaccatctttccataaagtaaatgaaaattaagaccatttatgaaaatgattaaaattataaacactaatcatattaactgttggtgaaactatcaaacaaatggaactctcatacactgttaaaaggaatgtaaaatggtgcaaccactttggaaaacagttcaaaagtttcttaaaatgtacatctaccatatgatcctttatttttacccagaaagcatatatccacacaaaggcttgtacatgaatgtccatatcacctttatttttagcaactaaaagctcaaaagtacccaaatgaactattgatacatttaacaacaagaatgggtcttgaaataaatttgctgactgacagaaatccagacaaaaaagaatacatacgctatgattctatatacataaatttttgcaaatgaaactagtctgcaggaacagaaagtacatgttccctggaatgctaggggacaggtgagataaatggattacaaaagatcataaggaatactttctggcgatagatatatttatcttgattgtcatggtggagtcttgattaattatgtcaaatttatcacgttattctataaatatgcaaatattgtattccagttacacctccataaagttgttaatattattgtggaattaatagccatttgtgtggattatagctatcaatattactgactagactgttaaaactaagaaaagttaaaggtatacagtgatttattttaaaataataataactattacatgctggcataggtaacatttttatgaaaataactaaacttactgaaaactgggacaacagtttacagctttgcaaatctttttttaagcctgacaatagaaggcaattagatcctcatatgattttgctttcaatctattggtatatgttgtactggttgattaaagaaaatgcagactcacacagatacatagttgaaaaacacagtaatattttaatagccttttcgaataattgtgaccattatttgatattacatcaaaactcaacaagtggaaatttcttaaaggtgtgttgcaatgtgaaaattcaaattatgtcaatacattttacatgccctattacattaaaacccattatgctgcagtgcacattgaatggattttatccatgtgtggatggctcatggactataaatgagaaaaaatcttgattctctgagttctgcagttctttccaagttataagtaatttcattctacaatgtctaagtaaaaaatttcagtttcatcttgagaaaagagtctattttttccctatatcaccattcactaggtctttgatattctgtataagtaagtagttacaatcatccccctatgagtaaatctctaacttctatctctttatgcttctttttatacaggtagaaactgttctattacaaaattaatattcatattatacttattatggaatatgaacccttcaagatctggttcctcaaatacgttaacagccttcttaccctcctatttgctaaactcaaagtttccagaattcaacttgcttgtacacattttgtcgactttccacacatccatacatgtataggtattcttattctggagagctctttatcttcttgaccaaagaacttttatagtctggtaaactgagtttctttgctgttatttgagacaagcttcctttaccattttgattgagatagggggttcctttcatgtactgacataatagctgatcctaccactgtctttgtcttttttatgaattgaggaaaggcactccttccatttgggtacaggcatacacaggatttggcagcctgttggaaccttattcagtgagaaataagcaggtctttctctagctggaaacagcctccaagtgggcacagggctagaaggaaataactggcttgaactttgatcatcacacatcagtcatccaggagtaagagtcattgtaagatgacagtacgcaaaatcctttctgcctgtcccaaccctctcacagcacattttcttttcattatataaaaacatccccaggtaaactctaagcaatttgagggaagaatctctgctctacctgtgtccccagggtgcagcacagaatctgacacacagacagcttcgccatatgtatgttgaataagtgaatatttgatgaaacatatcaagatgaatatctatctacaagaaaaaacaacgttcatcggggacttctctctgagctcatgtcatggtatatatgtcttgtgtccttcaactgtcaaattcaatacaccatcaatcttcagttgatagattagtgtggaaatttgaagcattaaaatgaaattattcatgggaaaagatttttttcttttcaaaatagaagtgtgaggcatgaaaagtacatgaataaatatatttgacatattaatttgggtaataattgaaggagagaaaataaaattttcaaacctgcttctagatcatggaaggttcagagggaatgagatgctgtggaagagcacacattgttaaccttgatgagaatgggtgggtatgctggctaagttcctttctggccacatgaatttgggcagattggttatcttctctgatcacaggtttgtcatttgtaaaataaacktatcattacctccattgcaaggttgttgcgaagatttaaaaatgaacgatgcatataaaatacctagaatagtattctgaactttgcaggcactatctggtagttctccacaattaaatatgagatataaataagagagatatatatctcatatatgtctcatattacataagtaaaagactctaaataattttagatctgaatgaagttcaaagatgacaattatttattttcttgatgggttgtatctgttttggatacttcctcatattttcatatcagtgataaatatataaaaaggtgtacatttaaaaatatttaagtcaatatacagaattttaaaaatggatatttgcttcaagttgactcctgaggagccattaaaacaaaagagagagagaaatgcatagttgctttattatttaataatgcatttggcttcagataaacaaaaacataacctacagcaactttgaaatttgagttttgttatacgtaccataaaatcttgagaggagcagcctcgagctggtaaagaagctcaatgtaccaggaaggatgcaggttctttttatttctgaccaccaccactgccactgaactttcatcccacctttttcatcttttacagctttcattctcatgcttattctccctagttggcaggatagattttacaccctcagggatcacttggctgcccatagctgcaaggatgaatggaagtttaatttttagctttccagaactcatagtagaggagggcaagtgaagagattaagaagcatattgattgaggccaactacaatatcttctacagcaacgaatcaacctatgtacacttaaaggttatcatacacatgtttgaaattaaacaaatttatcagtattctacattatacttcttacttcaattggttttgtattttaacatgaaaaatgtcaatagcaaaaaatgcaccctgttttaatactgtgtgtttaataaacatgtgtcctaagactttcatatatagaaagtttgttgaaagaggtattagctttattttattcaccccaataattcaaattagattttaacttacatgaattacatattgtcattgaacaaggtttgtggcaattataaaatatcttagatttaaacactttaagtaccttttcaagtaagacataacttttgtgaaccagttgtaaacttgtaatatgtagatggtctcttttacttttactcaatattttataataataaattattttgaatagtggcaaataagaatatgttatatgttgtgaaaagaaacggagttactaaatagaatctgacaccactaagtagggaatagatttgtaagatctgaaagatctgtcagtasatcggagagctctataagtaggtgtgtcttttgttttaacatcaaatctttagatgataatttacaatattttattttttatgtacttacaaaagtgatttttgatcatttgtcaaaaactaatttactttatgcatattacagtaaaattaggcaagctgacttgaaataggacataaccttggaaactttcaacatttttatatcttttttagccaatcagaatttttgtcttcctcgctaatattcctggtatctgcctcttatttttagcacccattaacttagtttttattgaagtaagaagcacaaaagtatcataactacttttatttttgttattttagagcaaaaccaaatatgtcaaatgaattccatttatctcataataatttcttaaaatcaagatacattcatataattattttctttgtttttttctccttttctattttatgctacatatttattgacctgtttttattcatttatataagtatttaccacatttatgaatgtctgtttcttggacgaaaaaagacacatggagttgttgcatttaaaagtatgttttgggtacatgtttggctagtgacattgataagggatgtcatttgtaagaggatcatggaagccaaggagaagttacagagaagtagaagggcaggaagacagatgtatttattgagacagtgtaaagacatataagcagtatcagtaatatttagtgataaaagactaaaggattaacatataatttttgagagaaacatacacttcacatggtttgttcaaagatgtcaccaatatattttttaaacttagagggtatttctggatgagttcaggatttaaatcagtgaattttgggtagattgcctttcataacatcggtgggccctattcaataagttgatggctgactagaacaaaaagaccagcctccccaagcaagagggagttctccagcagactgtcttaggacttcatctgcacaggtgcctattctgggtctctaacctgccagccagatttaggacatgccagcctccataattatgtgagcagtttccacgtgatatgattgtgtatgtacaatatccaaaagaatatataaaatattataattaaaacagaaactttgtaggattcctctatacaaggtcaatataaaaataaattgcatctttatataccagccatcaagaattagaaacttamattttaagaattatactgtttaccatacaattcaagatggacaagtctcctgcaaataaaactataaaatattagggattgaaattgaagaaaagatgaatatataaaaaaaaattcccaaattcaaaaaagggtattagtattcccaaggtattcttaggtttgatgcaatcaaaatcccagaaagtttttaaatattgataagttgatttgaaaaatcttatagaactaggaacagccaagaatagtcaaaataatattgaaaaagaaagaaaaaatgtcagactcacaataccataagtcaaaaaatattataaagttacaataactaagacactataataggattgataaacacaacaatttaatagaatagagtcaagaaaaacacccacacattcatagttacaaaagtatcactgatgtccagttggaaaagggacccttcccaaaatatagtactgggttaattaattctccagatgcacaaacaacccattctagatggattgtagatctatccataaaacttttaaaaaattaaaataaattaattgttgtatttaattggagagtcactagccacctgactatttatatttgaattaaaaattaaaacttcatccaggctcaatggctcacacctgtaatcccagtagtttgagaggacaaggcagaagaattgcttgaggccaagagtttgagataagcctaggaaacataatgacactcttttgaatttggggtgtctctaaacaaaataaaataaaaactctacaacaaaatataaaaattagctgggcacagtggcttgcacttgtagtcccagctactctggagactgaggaggaagcatccctttagcacaggaagttgaggctgcagtgagccctgattgcaccacagtaccccagcctggacaacaaagggagagtctgtctctaaataaattaaataaaaaaattattttatcagtagtaatagctacatttcaagatcccattattcccatacagctagtgactactgtatataatcagcacagatgtagaatattttcctcatcttggaaagttctattggttacattggttctggaaaataacagtggagaatttcttcataaaattggtgtaacaaagatttcttaaatagaaaagaaagtgctaatcttaaagacaatttcaataataaattgaacaaccttaaaattaagaacttttattgatcaaacatatcattaagaaagtaaaaaagatgactcagcaagtacaagtagatattttaattgcatgtatttgactaatattgaagagcacatattttttaaattcttataaatcaataagaaaaaaatagtcaaccaaatcaaaaaatagagcaaagacttgaaaggacatttcacacaaaaagagatactaaatgtccaatcaacatcaaaactatattgaaagaaatatatttatatatttatatatgtgaacatatgtgtaccaaaggacatgaattagcatgcgcatggcagcactgtatgtaacagctccaaatctgaaacatctcaaatgtatgtttacagttaaataagtaaataaattgtactaaattcatataatgtaatatgaaacattaatgaaaattaatggatgattactacatgtaactacatggatgaatatgaattttacacacattatgttgaataaaataagccaaaccaaaaaatatgtaatttatgattctacttacataaaattttaaaacagaagacaattgagttttaaaaatcagtaaggaagttttatttgagcataacgatgactaggaagtggaacaaggtaggcttctttattctgattaggttatatttttaatttttttgtatttaaataaaatttggtggcattataatatttatttagttgtgtatttgtgatttgtgcaattttctgtatatatattatactacaatatagagtttaataagataatttttaaagatacattgtacattgggccttaactctatgtacaaatgctttgataaagaagttccacttgaacacttaaaagtttgttaagagatctcactttgtgttcttacacaataaaataaaattttaaaaaataatgtttaaaaactgatttaaaatactcatagaaagcaaacaacttagaaaacatatttcaggatattgttcatgaaaactttcccagactttctagagaggccaacagtcaaattcaggaaatacagagaatccctgcaagattcttcacaagaagatcattctcaagccacataattatcggattttccaaagtcaaaatgaaagaaagaatgttaaaggcagctagagagaaagggcaggtcacctacaaagggaaccccatcaggctaacagcagacctttcagctgaaaccctacaagccagaagagactgggggtctatattcaacattcttaaagaaaaaaatcttcaaccaaaaatttcatatccaaccaaactaagcttcctaagtgaaggagtaataagatccttttcaaataagcaaatgttgagggagttcattactaccagacctaccttacaagagatcttgaaagaagtactaaatatagaaaggaaagaccactacaagctaacacaaaaacacacttaaatacacagaccagagacaatataattcaaccacacaaataagccagtatagtaaccaggtagcaataaaacgacagtatcaaatctatacataaccttgaatgtaaacaggctagatgccccacttaaaaggcacagagtggcaaactgaataaaaaagcaagacccaatggtatgctgtcttcaaaagacccatctcacacatgatgacacccataggctcaaaataaagggatgggagtaaatctactgagcaaacggaaaacagaaaagagcagggttgcaatcctaatttcagaaaaaaattaatgttaaaccaaaaatatcaaaaaagacaaagaaagcattacataataataaagggttcaattcaacaagaagacctaactattctaaatatatatgcacccaacataggaacacccagatacataaaacaaattcttagagacctatgaagtgatggagacccccatacaataatagtgggagacttcaacactccactgacattattagacagatcatcaaggcagaaaattaacaaagatattcaggacctgaactcaattttggaccaaatggatctgatagacctctacagaactatccacccccaaacaacaggtaggtataaattcttctcgtagccacatggcacatactgtaaagttgaacacataatcggacatacaaaaatcctcagaaaacgcaaaagaaccaaaattataccgaacatgttattggacaacagcccaataaaaatagaagtcaagactaagaaaatcacttaaaaccatgcaattacagggaaattaaacaacatattcctgaatgactttggggtaaataatgaaattaaggcagaaatcaagaagttatttgaagctgacaagatcaaagatacaacataccagaactctgggacacagctaaggcagtgttaagagggaagtttatggcactaaacactcacatccaaaagtagaaagatctcaaattaacaacttaacgtcacaagtagaaggactagagaagcaagagaaaatcaaccccaaagctagcagaagacaaaaaaaaaaaaaaaaaatcaaagctgaactgaagaaaactgagacacacaaaaattcaaaagatcaatgaatccagaatttgcttttttgaaagcatttataagatagataagccactagcttgactaataaagaagagagaagttgcaaataaatacaattagaaatgatgaagatgttatcacggatctgacaggaataaaattaaccatcagaaactacatcaaacacctctatgcacacacattagaaaacctagacaagataggtaaattcctggatgcatacgcccacccaagactgaactaagaagaaactgattccctgaatagaccaataatgagctcttaaactgaatcagtaataaatatcaccaacaaaacaaagcccagcaccagaggaaatcatagccaaattctaccatatgtataaagaagagctggtcccattcctagtaaactattccaaaaaattgaggaggagggattcctccccaactcattctatgagatcagcatcatcccgataccaaaacctggcagagaaacaacaaaaaaagaaaacttcaggtcagtatccttgatgaacattgatgcaaaaattctcaacacaatacttgcaaatggaatccagcagcatatcaaaaatctattccaccacatcaagtatgcttcatccccaggattcaagattggttcagcatacacaaatcaataaatgtgattatcacataaacagaactaaagacaaaaaccacatgattgtctcaatagatacagaaaaggttttgcataaaattcaacatctgttcatattaaaaatgctcaataaactaggttttgaaggaacatacctcaaaataataagagccatctgtgataaacccacagctaacaccatactgaatgggcaaaagctggaagcattccccttgaaaaccaaaacaagagcaggatgtcctacaccacttttattcaacataatattggaagtcctagccagagcaatcaggcaagagaaagaaataaagggcatccaaataaaaagaaaagaagtcacactctccctgtttgcaaactatatgattctgtatcacataagtttcaggataaaaaatcaatgtacaaaaatcactagcagtcctatacacagacaacagtcaagccaagagtcaaatcaggaaagtgatcctattcacaactgccacaaaaaattaagatacctaggaatacagctacccagtaagatgaaatatctctgcaatgagaactacaaaacactgctcaaagaaatcagagaagacagaaattgaaaaacatcccatgctcatggataggcagaatcaatatcatttaaatagccatactgcccaaaacaatttatagattaaatgctattcctatcaaattaccaatgatattcctcttagaactagaaaaaaaatttaaaattatatggatacaaaaaagagcccaagtagccaagtcaatactaacaaaaagaacaaaactggaggcatcacatgacccaacttcaaactatactgcagggctacagtaaccaaaatagaatagtactggtacaaaaacaggaacttagaccagtagaacagaatagagaggccagaaacaaggccacaaacctatgaccatctgatctttgacaaagctgacaaaaacaaacaatgggaaaaaacttcctatttaataaatggtgctgggataactggccagccacatgcagaagattgaagctggatgtcttccttataccatatacaaaaatcaactcaagatgtattaaagacctaaatgtaaaacccaaaactataaaatccctggaggatgacctaagcaatacaatcttggacatagaaatgagcaaaaatttcatgacaatgatgccaaaagcaactgagacaaaagcaaaaattgacaaatgggatataattaaacttagaaacttctgcacagcaaaagctttttgcataccaaaagcttgttgatagttgctaagaactatcaatagaataacaggcaacctacagaatgggagagaatttttgcaaactatgcatctgacaaaggtctaatatctagcatctataaataatttacaagaagaaacaaacagccccattaaaaagtaggaataggacattaacaaacacttttccaaagaagacatacatgtgagcaacaagcatatgaaaaaaagctcaatatcactgatcattagaaaaatgcaaaccaaaaccccaatggtataccattttataccagtcagaatggctgctattaaaatgtcaaaaaataacagatgctggtaagaaaatggaatgcttatatactgttggtgggagtacaaattagttcaatcattatgaaagcagcatggcaattcctccaagagctaaaagcagaactaccatttgacccagcaatcccattaccaggtatatacccaaaggaatacagatcattctgccataaagacacatgcacacgaatgttcattgcagcaccattcataatagcaaagacacggaatcaacctaaatccccatcaatgatagattggataaagaaaatctggtacatgtacaccatggaatactatgcagccataaaaaagaacaagataatgtcttttgtggggacgtggatggatctggaggccattatccttagcaaactaatgcaggaacagaaaaccaaataccatatgttctcacttataagtaggagttaatgatgagaactcatgaacacaaaaaaagggatgacagacactgtggtctacttgaggatggaggatgggaggaggaagaggaaaagaaaaaataactattgggtactaggcttaatacctgggagatgaaataacctgtgcaacaaattcctgtgacatgagtttacctatgtaataaatcttcacatatagcccaaaacctaaaatgaaagctttttttttaaagtaacaccttaaaatatttctaatgttaaatgtactgccaaatcctgaaataagacctctattcccagcatgtattttcttaaaatatactcactcttcaattatttgtccactctgttaaagttgtctctaatattttattatttaaattattttcttcatactctttcagtagcattatttaacaacatttgagtttttagtgcataatttttcactcttaaacaaaggtctaaaaataaatgaattactcatatgttcacgattatggcattaaaaatttatccttgaacttcgtcccatttaaagattcattcttcgtttcccagaatacctgtactctaatcygttcacatttctgattttctcctttccttctaacatttaggagccctcttgagaatagagatcctgagagaggattgaaactcctcatttttaaaacttttacccttgtaatgaccactgccacaaatctattttagataaatcacatgaaattttcgatattttaatttttgacatacaaaaatgatgagctcatattattcaaactaaaatattatcactatttcgtctcttaaaattctactcatccaatgtcactttcctcaggaaaatttccacaattgccttatcctgaaaggatttctcctccctacagaaatctactctgcaatcacactgtcattgctccctcatggcatcacttctggaggtgtccctgaggagagagtaagcacgggtttcagccagaactgtgttcaaatcacgactctttcatgtgcttgcttggtgatgttgaataagttatttaacctcccttacctctcagttcccacacttataaaagtttctgttaagtactgagattataaatttaatattttatatactgtgaattttatatagtgttcaataaaagtcatttttaaaaattcaaaaaagttccactttaagcaattctttaaaatcacacagaactaatttataacagagaccaccaaactccctactatgtgacttgtacaaactaagaaagctctgttggagcaaattttggaagattttaaattgatgactggcaacagaaatactcccatacaccactgttatatatttacattaggtatataataatacattatagtcaaaatatcacctgtatgtgacattatgaggtatatatatgacatcatagatatatatggcattatattatatataatactaatgttattgtatcagatgcatctgtctataagaaatataatactaatagttttttaggttatccaacagattactgaaagccattgtatgatttttaaaaccaattatgttttaatgagcattacagcacaagttgaatttataaataagcaaaatgttctcagtaacaagtgagtctcctacctactttttagtcctggatccctcctgagaggtaatggctatgaacaccttcatgtttatccttctactctttctatatatttttccccatatgctattccatatcttgtttatttttccaataataaataaatctaacagacaatgaattttcatatatgcaaatgtgttttattcattataatggttacatgaatgccactgtttgaatgwaccatagtaaatatagcctgtctgtcacagataggtatttagctttttccagatctttttgatgtcttctgcactgcaatggatattcttaggcattcaccatttcacatgggtaagtataaagctacaagacaaattcttgaaattacttggttaagtgatatttttaattttgatagatattgccatagttgtacattaaggtggaagcaatttaccttctcataagtcaaataygattttagcagttgtgtttcagaatgataattctatgtgaaatctggaagatggactatagcaagaaacaatgacatgtgagatactaatttaaacgctaatacagtgatagaaaaaggcaataagaagtgaaaggaagtaacaatttctagaagtattgaagtagtagcattgagaggattgagataatggcacctttgagtgctctatccataatggccttaagtgtatcttttactaaatcaatcaaactgaagtcccaataattcaagagaaatccagtccattaccacctcaacctttgacttctcagcttcttttgccaaattctcacttcattaaagtgctactaaaatgaattcctttgtcacatgtctccactactctacattaagccattaacatgggcttttctctcttgagacttttggccttaaaggttagcaaaccccaagttcaagtatttggcctatatcattgaaagcctaagggggaaaaaaactgttcttaaatatgactctgtatttaacctccaaaatatcaagttcagcattaagaattctataatcctagaggagagctatccacatgatttacatgtagagaaatgtattaatttcttctggagaaactgaaatttatcagagaatatgagcagcaactcttgattattgacttaaatccttcactattgataaatcagtttccaaaatccttatgatgtgcatgaaatatgttttcttcctgatgtgagaaaaccttaacccagtgtcactcttccaaatgttatgtacctataaattggaagaatgtaactaaagttgtttgtgatgcgatttctcctgttggagaatggtagggcagacagctaggttttttgaaaatttttattcaacatttttgctcagacctgtattccacttgagcatctcaatttggttcacytcttcccaagatgatataactagctaattatgacataaaaagaatttggaagatggaaaaagcagtgatccctggaagagcatgtgaaagccttaagcagacatcttactagcaaagatgtctgtggattatgggtataccagacacttttattktaattaagattcaaacttcatgctaatatccctgaaatctaaagctagcataggcaaggttgaaagggtggtagagcaaataaataaaatctaaactaaacaaacctgttcttttaaagcagtcaggaaattttctgccttccaattgttagagaygattctactttcagagaggctgttttgttgttctaggaacaccacacactgaaaatgtgctttttaattttgaggatgtagatcagtggtgtgacyccaaggaatgcaattgctttgtaagataatataaagaggctggctttgttgcaagcagagttgcatttccgcagattgtacttcccttagaggaatttttctccaaggatggttttagaatgtgctctctctgaaaattatagcaagcccttggggacatttttgtgaaaacaatggccacaagatgtcagcaatagagacctctaaggacttcaagaaagacctgaaagctcaattaactcgagcttggggaaaaaaaaaataaactgtacagtggaaataaattgggcttrgctaaacattraactattagattagattgttgatttctcatgctattattattcaaggcaagtagtgtgtttttcaagagaggggctgatggaagactattttgtcccaataggattgttctttagaataagttgggcaagatcatatgtgtgtggttggaagtgaaattgtccttaaacagaatagaratgtttatgaaaatcattcagggaagaggtcaaacttggaacagaaactgaattggtgagtctaagatwgggaggaaagagaaaatctgtctttccattggtagtaggattgtcatgctaaagaatactggtttaggtgggtggcgagyagaggaattaggagaagtggaaattggccaatacagtatagacacagrctggaagctagacaggagctatcttgtgaggagcctctwaatagtaagttctagtttaggtktacctttgagctctgagattggcatatctagtaccagttataaattacacacaaggttttgcttctcttctaaaatgttttaagtttcaacttcctcagtgagaaattaaggacaaatttacactcatacttgagaagcaggacaagagagaaaaatcacagagacaacacattcatttgctcatttttccacrtgtttgtcacccctgctatataccagacactattctatgcagggaatacatgggtgagtaaaatagccttgataaatgagacaatgtctcttacaaagctaacattctaatgtgaagagatgaataaagtaattggcgattttaaaaaatgaacagtataaaaatttagatactaattagtattatcagaataataaaataagttaatataatagatgatggggacatcattttgaaaagatggccaagaaggcctcttttaagaatcacttttgaatagatacctgaaatgatacgaagccagccagctccttatggagttccataaggagcttagtaaaagcaatttgtacagagaaacaccaaactccatggccttaaagaaagcagaactggccgggcgcagtggctcacacctgtaatcccagcrctttgggaggccgaggcgggtggatcacgaggtcaggagatcgaaacaccgtgaaaccccatctctactaaaaatacaaaaatattagccgggcatggtgtcatgcacctgtagtcccagctactggggaggctgaggcaggagaatcgcttgaatccaggaggtggaagttgcagagccgagatcgcgccactgcactccagcctgggtgacatgctgagactccatctcaaaaaaaaaaaaaaaaaagcagagatgtacagtccaataggtgggtagaaagcaaggatcaatagaccagaagcagatgccaaagtgaagtggaaactgaagactaggtttgctttccagaatatataaatgtagtctagaaatttgcagaaattattttggcagggggggagctcagtgaaaaaaatacacacacaaaagcacacacacatatatacgtatatgcaataaaattagaatgaggcatgccattttgaaatacaaattttgagggcaaatataagctattttgatacttacatgcaagtaagcccttgccataccatttatacttatatttttaatacaataaaataactaacttgctctgaataggtattaatttttgaagctgatatatctagatttacatatacattgagatatatatctttgtgcacctcaaaattaaactcaaccttcacaacaggtcccagttttcatttggggatttacataccaaacaaagtcacatattaatggtgccacagtaaaacatgtgacctaggctaagtccatcagcaaattctggagtttttaaaagatttctgaggctaagaaacgagaagcaaacatgcagtctcatgaggtgctaaaagccatattcataccatgatgggaaaaagctttaggatgacaccaacagatttgaaggcaaagtggaaagtagaggaagcatcttccttggaaatatcattgactattgagtctctaaatcaatcattatctgaagacagtgctatctcaaatcttatggttatgtaaatcaaacaatttattttactatgtragacttttatttttttgacactgggtctcacactgttgccctggttagrgagcagtggctcaattatagctcactgaagcctcaaactgttgtatttaagcaatcctcctgcctcagtctccagagcagctgggactacagcaaacaccaccatgcccagccagctttttaattttttaaatttttttaagtagatgggatcttggtatgttgctagggctggtctcaaacktctggtgtcaagtaattcttcaacctgagccttccgaagtgctgagattacaggtgtgaaccatcacacctggccaagacaattttagccatgtctatttattgttatttccaacccccaccctccccaaaaattataatataaatttgcctgtaaattggtaattagcttatagttcatcatggtgcagtgactggaaatatttgtaaaatggtacagaattcttatgagaaaaaatgatatacaaaatcctcaaatcagatcagatgtgcatagagtttaatatgtactgtaatgccagcacatcttttatgccacgattgatgctcaagtatttttatatttccagaaatgtagatatgtgaagcttttgttccaagaagcttggagttctttgcaagcatctcataaatcctcctcattatatctctctaaaatagtcaggttataggtattattattcatatttaacataagacaagagcaatttaaaamkcttataattccatttatctaaaaagataaaactattcaccccagaaagactaaatataacttggcagtgagacatattggtcctgagttgctttaaagttcaatgcaacyaaatgcttttaagtcttatagcttttcttttttccatttgagagcgccaaaagctggtaagaaagaaactatccagtgctcactttaaaataatctcttatgtgctaatttgtgtgtcccagttacactcttcaaacaatggtgtcacgttaagactcgatcaatatgtcatttatgtacaaaaaagactaaataaggttattaaatagaacaatgttttgagatagtatttaataatgtattaaaaatagtaaatgatagacttaacattgattcatttaactttgtctacccatcccattctcagtgtttctttggactaaaaatgcaggttttgagagaccagttgtcagagttagaaacacagtatgtggcaagaaaacatttacattaaccagttgagataattcattaattagaaactgacaattattgctttgccaagtatgagtacataattgctctttcccatagtagtcttctgtgagtcttaatctcattttgtattaatcattaaatatcagactttaccatacattgggattacagttggtaaattcaagagaggcacattatcattattaaatgggtatatcccgcccacacagactgtcacaaaatctggtgctttgaattaatgaacttaatggttaagtattccatgattgctatcaaaatagtcaagtgttatttaaatatcatttttacggaaatgagaaatggggtatcttccacagaccttcaaaagaataaatacattataaatttactttctataaaatcccattaaagggaagtaatgaatttttgtaaagggagattcttatacaatgttactggaaaatgaatcaattttaactcttaaatggtttctagattaatatgttactaggaaattcattttggtgtgcacatctgtcactttaagctactaattgaaatgtcctggccacaaaaagtcaccttagagagtgcagggtcatgactcagaaaagtcaaatactatttccagtaaatgttcctcctgaaatttagaaagtctcaggaattaaaggttttgtgattgaagtaaaaattcttgtcaattaagaattattttttgataaaaactaaaaattggtatatatgttcttttaaaaaattacaagctgaattttatttattttcagttattaatttatttttatagagacagggtctcactctatcacctaggctagagagcagtggtgccatcatagttcaccacaacctcgaactcttgtgctcaagtaatcctcctgcctcagtctccaaagcagctgggactacaggcaaatgccaccatgcccagccagctttttattttattttatttttttggacagattgggtctcactatattgctagggatggtctcaaacttgcactgtagcctcaaactctggagctcaagtaatcctccccactcagcgtcttgattcgctgggactacaggtatactccaccatgctaggctaaaagccagttttgaaacaaaaatttccaaatatatttcagtttacttctaaaattgctgaaaatgttaaggcaataatttagatagcaggggtcttcagtttctggcaaaaggaacactttaaatactataacagtctagtttcagaagttagacaatgttgaaaaacaatcaaattttcaaaaggacaatgttaccctaatcttgatgatatgtggttagtgaattaccttaaaaaataaaatgcttctacatttcartgtgtggcattaataacatttatcctgaagacttactaaggattttcaatttgaacttgtcagtgtggctaacactgtgattatacacaaaaagtagattggttaacacacaatctaattgaaacattcctaaagtttacttcgtaaaggaatttcacaattatgttcatctaatgactagctcatatgtgatatacatgtgcatgcacatacacacaaagggtgaaaacacttagcaacataatcttcatgataatactccttatcacatcttaggtcatgatgtgcagtgcagaaatgagatttagatttgggcagggatttgagggagtacttgggtagcaggtatcatcaggtaaggctcaggtatagagtaggatttcagggatgaagtgggggatgaaggataaaatgttacagtaaattataatacttagtgttttggttcatttgggttgttattaagaagtacgtggggctgggtaatttataagaaaaaatgatttaattggctcacagtctgcaggctgtacaagaaggagaccrgcatctgcttcacttctgggaggcctcagggaacttttattcatggtggaaggtgaagggggagcagacacttcacatggcaaaagcaggagcaagaaagagagtggcagtgggggtgccacactttacaacaaccagatctcatgagaatgcaccactgtgaggacagcaccaagccatgaaagatctgcccccatgaccccaccaggccccacctctaaaactggggatgaaatctcaacatgagatttagatgggacaaatatacaaaccatatcacttcaggaaagtaaactaatacaataaattataattcatcaacttgcaaccaggcacagtggctcatgcctgtaatctcaggactttgggaggcctagacgggcggatcacaaggtcaagagttcgagaccagcctggccaatatggtgaaatcccgtctctattaaaaatacaaaaaattagccaggcgtggtggcacacacctgtaatcccagctacttgggaggctgaggcaggagaatcacttgaacccaggaggcggaggtcgcagtgagccgagattgtgccactgaactccagcctcagcaacagagggagatgccatcaaaaaaaaaaaaaaaaagaagaagaagaagaagaagaagaaagaaaagaaagaaaaagaaagtaattcatcaacgttaagttccaaataagttacataggtctaaaccagtagcctcattccttagaattgatacttaagaaaaagtatttaaaaaccttaaagggtaggggagaaactgtatcaatgaagatgctctttgtggtgacattgtatctgcagaagttagaaacaatctaaaactacaacaatatgcaattagcttatttatttcagattcacctacttgataatttttgtgttaattttttcagtcagcagtgtttattgagtgccttctatattccaggaaacattacaggtgttggagatggagtggtaatacattgtacatgggtcctatcttgttggaattaactatatttcagtcataatcaactatgataatattgaagactgtacagtatatagaacaatggttatgtatttttcaactattgacgtttgaaaatatatttatatagaagttgtaaacatactgcagagcattctaaggcatccttcacccggatacctgcaatgacaacattttacatagccaaagtataacaatcaaaaccaggaaattgacattggcttaatactattaactaaattayagacttcagacatatttcactaggtttttatggacacactttatgtgcgtgtgtgtgtgtgtgtatagttctatacgattgtttcacatgtgtagatttgtaaccaccacaaaaatcaggatatagtaatattctttcattccaaacaaaactgcccttgctacaatcttctagtcccagccttcccacagccttaacccttgacygccactgatgtgttccccaacactataattttattatttccagaatagtatacaagtggaatcataccaaatgcaagcttttgaaattcccttttacacttagcataatgcccttgagatccatccaatttgttgcatgtctcaagaatgttttcttttatattgctaagtcatattattttgtggggatgaatcacaatctgtttacacattcacccatagaacatttaacagttaacttttgatcctattagagtgatatacattattaatatctatttttaaattatacaatatgtgctytcccagccagcaaggtgactagatctattaggtgattaataaatatttattggttgaatcaatttccaggaaaaaatatagaaaacatataattatgtagttcattctatgaaatratttgtagtaattgatttcataattttgtttttctagaactctatatttaaaaaaaaacatgagctatggaacattataattaatcttctaatgctaccttattcactatgataccttttacattctattaataattttctccaaaatctaggttatattatgtcatttaatgacccaatttttaaaaaactctccatgagaaggattattctccccatactgcagataagaatactggagttcagcaaattagcatacaaattaataaaataagagactaattacctcatagaaaaataaacaacattaataagatgcccaataattttaaaaatgatttattctagtaagccaaaatatacttattgaaagaccaatattttttaactattgaactatcaaagatttgttttaagtgataaatacccaagacttctgattcactacttagaggatccaaagttagcattaagttccagaggaaaattggctataaatatcttcaccaatgtgacttaataaatctacttcaagtatttttttctgaaaaaaagtatatgtgtgtgggtatacatacacatatttgtgtacactcacacacatatacacacatatatatttatttacaaaggtgtttatgctaataatgaaaaccccaaaatttttagctcagacataatttaaatacataaagtataaaatagcaatatttatagaattttacagagaaattaaactgattttttttatattttaggttatttgtgatcctacttttttgagacagcgtcttaccctgtccataattttttaatgtttcctgtgtttcacaatataatattgcatctgtttacaataattacatattttaaaatcagaacatatatacaaatatatgtaaacatacatacacagaatatacatacaaatatatgctttacgtctttaatatcttttctatgcttgaaaatcacttctcactttatgtctcagttggttttcacagtagcaatttaagaatgtcattattgttccattttgctatcagaatactgagatgtaaattgaaaagtgatctgtcaatatctcacagataataaatgccaaatttagctctcacaatcaagtattctttcgcagggtgtagtattctttttactgcactctgctgactgcatatgaagtgttacacttcataggtaataaatatatttcaccatatttgttcactataatacttagacttgcctaagtggtagttttaagtacgtaggcttaaattgattatagcaatttaaagaattatttagtacttgaaaaatgtaaatggcaacaaattcatttcctatcaaaagaaaggtttccaagtagctaaatattgaatggaactatgccatttgtatttccaagattcagttgctacgaaggacattgaatttccctataatgcaagcatagcccaggggtgctatatttaaaactacattgrcatttctatkaaaattccagcttttcaaaggtttatgccaaaaccataaaaattctatttgatagaaaggcagaattgaaagtcactgtggagattgtttcctttctttctcatataaaatcagcctacctgcttgttttcttcatgaaatccaaacactttagctgaacaagaatcttgggtaactgtgaggttgttcagtataccagcactctacagatttgagaaaactgtaaggtagttgtacagtctgaaggcttgtttattccaaactctgtgcttgtaaatctaaaaactctttttgttaatagtaatggactccagaccaagaacatttttagtcactgtgtcaacagttcatactgagtaacaaaagaaatgatagcttgtccatattattaattaacttctatgacttatattttatgttttgaagggtaacacagaagcctgtccactaacacaagggcatgtcaatttagaaattttgtctttataattgtttttctgtcactcagttaaatatgccttcattgagtcctagaagtctttgcttagaattgttattacggtagcagataagcaggaatactggacatagctctgggtttttttccccttttattttaggctcagggagtacttgtgcagatttgttacatagataaattatgtgtcactgaggtttggtgtatgaatgatcccatcaagtaggcagtgagcatagtacctaataggtaggcttccagcccatgctccactcaagtattctgcagtgtctgtttttcccatctttatgcccatgtttattcaacatttagcttccactcataagtraaaacatgcagtatttcattttctcttcctgtgttagactgcttggaatgatggcctccagctgcatccatgtagttgcaaaggacayggtttcattcttttttatgtttgtgtagtattccatggtgtgtatgaaccacattttcttcatccagtccaccatttatgggcatcttggttgaacccatcgtatagtctttgttattgagtgtgatgaatatacaagtgcaagtgtctttttggtagaacaattcattttcttttgggtatatacccagtagagggattgctgtgtcacataatagttcttttttttttctttttttatttattattattatactttaagttttagggtatatgtgcacaatgtgcaggttagttacatatgtatacatgtgctatgctggtgtgctgcacccactaactcgtcatctagcattaggtatatctcccaatgctatccctcccccctcccccaccccacaacagtccccagagtgtgatgttccccttcctgtgtccatgtgttctcattgttcaattcccacctaagagtgagactatgcggtgtttggatttttgttcttgcgatagtttactgagaatgatgatttccagtttcatccatgtccctacaaaggacatgaactcatcattttttatggctgcatagtattccatggtgtatatgtgccacattttcttaatccagtctatcattgttggtcatttgggttggttccaagtctttgctattgtgaataatgccacaataaacatacgtgtgcatgtgtctttaaagcagcatgatttatagtcctttgggtatatacccagtaatgggatggctgggtcaaatggtatttctagttctagatccctgaggaatcgccacactgacttccacaatggttgaactagtttamagtcccaccaacagtgtaaaagtgttcctatttctccacatcctctccagcacttgttgtttcctgactttttaatgatcgccattctaactggtatgagatggtatctctttgtggttttgatttgcatttctctgatggccagtgatggtgagcattttttcatgtgttttttrgctgcataaatgtcttgagaagtgtctgttcatgtccttcacccactttttgatggggttgtttgtttttttcttgtaaatttgttkgagttcattgtagattctggatattagccctttgtcagatgagtaggttgcaaaagttttctcccattttgtaggttgcctgttcactccgatggtagtttcttttgctgtgcagaagctctttagtttaattagatcccatttgtcaattttggcttttgttgccattgcttttggtgttttagacatgaagtccttgcccatgcctatgtcctgaatggtaatgcctaggttttcttctagggtttttatggctttaggtctaacatttaagtctttaatctatcttgaattgctttttgtataaggtgtaaggaggggatccagtttcagctttctacatatggctagccagttttcccagcaatatttattaaatagggaatcctttccccattgcttgtttttctcaggtttgtcaaagatcagatagttgtagatatgtggcgttatttctgagggctcttttctgttccattgatctatatctctgttttggtaccagtaccatgctgttttggttactgcagccttgtagtaaagtttgaagtcaggtagtgtgatgcctccggctttgttcttttggcttaggattgacttggcgatgcgggctcttttttggttccatatgaactttaaagtagttttttccaattctgtgaagaaagtcattggtagcttgatagggatggcattgaatctgtaaattaccttgggcagtatggccattttcacgatattgattcttcctacacatgagcatggaatattcttccatttgtttgtatcctcttttattttcttgagcagtagtttgtagttctccttgaagaggtccttcacatcccttgtaagttggattcctaggtattttattctctttgaagcaattgtgaatgggagttcactcacgatttggctatctgtttgtctgttgttggtgtataagaatgcttgtgatttttgtacattgattttgtatcctgagactttgctgaagttgcttatcagcttaaggagattttgggctgagacaatggggttttctagatatacaatcatgtcatctgcaaacagggacaatttgacttcctcttttcctaattgaatacccttcatttccttctcctgcctaattgccctgkccagaacttccaacactatgttgaataggagtggtgagagagggcatccctttcttgtgccagttttcaaagggaatgcttccagtttttgcccattcagtatgatattgactatgggtttgtcatagatagctcttattattttgaaatacgtcccatcaatacataatttattgagagtttttagcatgaagggttgttgaattttgtcaaaggccttttctgcatctattgagataatcatgtggtttttgtctttggttctgtttatatgctggattacatttattgatttgcgtatattgaaccagccttgcatcccagggatgaagcccacttgatcatggtggataagctttttgatatgctgctggattyggtttgccagtattttattgaggatttttgcaycaatgttcatcaaggatattggtctaaaattctcttttttggttgtgtctctgccaggctttggtatcaggatgatgctggcctcataaaatgagttagggaggattccctctttttctattgattggaatagtttcagaaggaatggtcccagttcctccttgtacctctggtagaattcagctgtgaatccatctggtcctggactctttttggttggtaagctattgattattgccacaatttcagagcctgttattggtctattcagagattcaacttcttcctggtttagtcttgggagagtgtatgtgtcaaggaatttatccatttcttctagattttctagtttatttgcgtagaggtgtttgtagtattctctgatggtagtttgtatttctgtgggatcagtggtgatatcccctttatcattttttattgcgtctatttgattcttctctcttttttctttattagtcttgctagcggtctatcaattttgttgatcctttcaaaaaaccagctcctggattcattaattttttgaagggttttttgtgtccctatttccttcagttctgctctgattttagttatttcttgccttctgctagcttttgaatgtgtttgctcttgcttttctagttcttttatttgtgatattagggtgtcgattttcgatctttcctgctttctcttgtgggcatttagtgctataaatttccctctacacactgctttgaatgtgtcccagagattctggtatgttgtgtctttgttctcgttggtttcaaagaacacctttatttctgccttcatttcgttatgtacccagtagtcattcaggagcaggttgttcagtttccatgtagttgagtggttttgagtgagattcttaatcctgagttctagtttgattgcactgtggtctgagagatagtttgttataatttctgttcttttacatttgctgaggagagctttacttccaagtatgtggtcagttttggaataggtgtggtgtggtgctgaacaaaatgtatattctgttgatttggggtggagagttctgtagatgtctattaggtccacttggtgcagagctgagttcaattcctgggtatccttgttgactttctgtctcgttgatctgtctaatgttgacagtggggtgttaaagtctcccattactaatgtgtggttgtctaagtctctttgtaggtcactcaggacttgctttatgaatctgggtgctcctgtattgggtgcatatatatttaggatagttagctcttcttgttgaattgatccctttactattatgtaatggccttctttgtctcttttgatctttgttggtttaaagtctgttttatccaagactgggattgcaacccctttttttattttccatttgcttggtagattttcctccatccttttattttgagcctatgtctgtctctgcacgtgagatgggtttcctgaatacagcatactgatgggtcttgactctttatccaatttgccagtctgtgtcttttaattggagcatttagtccatttacatttaaagttaatattgttatgtgtgaatttgatcctgtcattatgatgttagctggtgattttgctcgttagttgatgcagtttcttcctatctcgatggtctttacattttggcatgattttgcagtggctggtaccggttgttcctttccatgtttagcgcttccttcaggagctcttttagggcaggcctggtggtgacaaaatctctcagcatttgcttgtctgtaaagtattttatttctccttcacttatgaagattagtttggctggatatgaaattctgggttgaaaattcttttctttgagaatgttgaatattggcccccactctcttctggcttgtagagtttctgcccacagatccgctgttagtctgatgggcttccctttgagggtaacccgacctttctctctggctgcccttaacgttttttccttcatttcaactttgttgaacctgacaattgtgtcttggagttgctcttctcgaggagtatctttgtggcgttctctgtatttcctgaatctgaacgttggcctgccttgctagattggggaagttctcctggataatatcctgcagagtgttttccaacttggttccattctccccatcactttcaggtacaccaatcagacgtagatttggtcttttcacatagtcccatatttcttggcggctttgcttgtttctttttattcttttttctctaaacttcccttctcgcttcatttcattcatttcatcttccatcgctgataccctttcttccagttgatcgcaccggctcctgaggcttcagcattcttcacgtagttctcgagccttggttttcagctccatcagctcctttaagcacttctctgtattggttattctagttatatattcttccaaatttttttcaaagttgtcaacttctttgcctttggtttgaatgtcctcccatagctcggagtaatttgaatgtctgaagctttcttctctcagctcgtcaaagtcattctccgtccagctttgttccgttgctggtgaggaactgcgttcctttggaggaggagaggtgctctgctttttagagtttccagtttttctgctctgttttttccccatctttgtggttttatctacttttggtctttgatgatggtgatgtgcagatgggtttttggtgtggatgtcctttctgtttgttagttttccttctaacagacaggaccctcagctgcaggtctgttggagtactgggccctgtgagttgtcagtctgcccctgctggggggtgcctcccagttaggctgctcgggggtcaggggtcagggacccacttgaggaggcagtctgcyggttctcagatctccagctgtgtgctgrgagaaccactgctctcttcaaagctgtcagacagggacatttaagtctgcagaggttactgctgtctttttgtttttctgttccctgcccccagaggtggagcctacagaggcaggcaggcctccttgagctgtggtgagctccacccagttcttgcttccaggctgctttgtttacctaaggaagcctgggcaatggcgggcgcccctcccccagcctcgctgccgccttgcagtttgatctcagactgctgtgctagcaatcagcgagactccgtgggcgtaggaccctccgagccaggtgcgagatgtaatctcctggtgggcagtttttaagcccttcggaaaagcgcagtattcgggttggagtgacccgattttccaggtgccatctgtcacccctttctttgggtaggaaagggaactcctgaccccttgcgcttcctgagtgaggcaatgcctcgccctgctttggctcgcgcacggtgcgcgcacccactgacctgcgcccactgtctggcactccctagttagatgaaccyggtacctcagatggaaatgcagaaatcacccgtcttctgcatcgctcacactgggagctgtagaccggagctgttcctattcggccatcttggctcctccccctcatccccacataatagttctatttaagttatttgagataccttcaaactgctttccacagtggctgaastaatttacattcccaccagaagtatgtaagtattcccttttctctactacctcactattgttttcaactttttaataatagccattctgactggtgtgagatggtgyctcattgtggttttgatttgcatttctctaatgattagtgataatggacatttttttcatatattcgttggctgcctacatgtcttcttttgagaagcatctgttcatgttttttacccatttttaatggggttatttgttttttgtttgttgaactgtttaagttccttatggattctggatattagacctttgtcaaatgcatagtttgcgaatattttcttcctttctgtaagttgtctgttcactctgttgataatttcttttgctgtgcagagctctttaattagatccaacttgtcaatttttgttttctctgttcttgaagggctaataatttccttgggggaaattagattagctcatgaaacacgcagttcaaatacatactcgtaatcattgtaaagcattcactaaaaacatagatgaaaattctaataatgttaaatacacttyaactagttataacctaactttttaaggattttatgactgaaaacaacataagrcaacctamtgcataaggaacattaagaaacatgtaaagatgtatcaaaccatatctcagtttttttaattataaggtgagaattagctgtgatcagtgttttttaaactgaaagagggctgttatacttcctttaaagtcatgaaaagtagtcatgaaattaaataaatgggccacaaccagcattcttctaataaataaaatggtatagaatagaaagaacagaaaacatcaaagcatatcacatgagggtaagtgctgtttcatgaaatattttttaaagttattttggaatatgtctctgtgtrtgtatgtgtgtgtgtaatccatcataagatatatttccttttgtgggtcatcatacatataatttagattagatggactagtttcatttcatttcttaagttctgcagttttgtaaackgtcttagattccatcaggctgtaacaacactgtgtcacattaaacactaatttccactggatttaaaactttcatcagtttaagcaaaaaattcatctcttctaaaatccctgttctcccaatttgttattgtagagaatrtgaaggctggaggtatcctgcatgtgtcatgatgatttgagtataattttttctactctggcattcttttctaggaactgaaccaagtttgtgctgagactcattttcagtccttgaagtttctgcaagtgctatatttcatgcacagtatcaggttgaccctgaagcaccaaagctctattcctgggatctcatagtgcagttaatgaaatgagttatttaagcttctatcttgagcctacttgtttttgccagatatcaaacctaacctaactgactggtaagccaaraaatgctgtcctatcaattctctaattttgtcacttctctctcctctccctaagtcctcctgcaaaaagattgtccatattccttcagccaaaagataagggcactttcatggagatcatttgtctatttgctcttgacccctaacctccatcctgcctgactgctatgtattaggagactgaggtcagcacattgtatttctcagacctcctctgacagctggctttttcttgagtacttatcattaggagagggaacacggaatcagaaagtgggaggaagagagaagctttccgtttctggttcattcactttggtagttgttgaaaattgctagaaatgcagagagagaggatgatactggacttcagcgatctgggaaaggctaccttttcagtgtcagtcctgggatggttaagctgtaacctctttggtggatcaaacaccaactacaacagagtttctaacagaattgcatcaggcacaagctcatggactctaggtcaaggactttcacagcttttgatctttgagtatcatatcttttgccttttctttctctagataatatcaccctttcccccttttgatattcctgtcctttctacatgtttaaagccagttctccatattgcatttcctctaaattaatagagttgatctatttctttaactgaactctgactcagtccttcaacacaaacggggatggaagacatatcaccaaaaacagcactattttgaacatctgagttccagctctactttagcctatggaataagagatgaaggcatttgctttgggtttatgagtagtcttagcaaaattattttttccttattggtgcttgaagtaaattagaacattgttygacaaaaattcattccctctgatctacatatagggagtacatttctatgctccacagatgtggaacatagccatgcgatttcccttgatccatgggataygagttaagtaacagcaataaagtagyaatcttatgccttagggggcatcacatatttccgccaatgccttgggaatattctgactgctaccagaaaaaactcctgcttcaattggcttcttcctgtctcatccatgcatggatcagaactgttccaacacacatgcagacttgcagcacaaagctcagttgcctccgccaaactacaggcctgagaaaatgtgaataaaagctatgtttgtctttgagattttgaaattgtttgatatgcagacaaagatactactgtcatagttttctgccatattttagcttttcctaacttactgacttctctctatgtaattgctaacatagataatctctgtgatcagtatctgtgcaactctctgacctcgccatcgtgacctgttgtgactggctacataatatctggtgatttcatttaaagccatgagaaaatgaaaatgttattaatttttcagcacttgcataacacagaaagcaactggtaggcttggccaacaatttcaagaaataatattttcaaaaaagacatattttgcttaagctaaaaatgtgctatcctttattaatttatgtatttgttcattattcattattatttcaaatgtggagaatacacaaacagagtttcttgatctcattctaaagacagactctaaaatataaacaaataaatcaacaatatagtgccatatgctattttaaataggttgatcagtgaagatctttggccttttgccatagtcgtcataaacactagcagrgtttgtttgtgttattgttgaaatatatgtataaaccaataatttcatatataagattagtccagaaaaaaatattcttttttttcattcagcaataattttttaaatgagattctgtgccttgcaaaatactcatgatgaaaaagctggtatttattacaaagttaccaaaggatatctttcagaacccaaatataagaactttaagcagacgtatcaaatgattggaactagaaattagcaaattacctgaagagctgctttctccatttctctcttttctgaagctgcatttcctctgctctttactttgcttgatgaatatctaatttattccttactctgcaaaataactttctctaattgcccatgacccatgtggccactttagccccagattcataggtattacataaarataactgataacattctccaattccaaattcttagtaaggggaatcttactaacttttactragagcccaagctcaaaacttctctaggtcagtgattctcaaagtgcaatttttgtacckgtaagagtagcaacacctgataatgtgttaaagatgcaaattcacaggcccagctccagacctactgaattggaacctccagggtggctgtcagaaatctgtgtctcaagcctttcaggtgattctaatgcatgctaaactttgagaaccactgctctaggtcatgcctctagtactaatgaaaatatatgaaagtagatcacttagttcatataaaactactcacttttatgaatcatggggtagggatgagatggattttaaagaaatttcttttaaatggaaaagggaagtatggaatagaaaataaatgattaacctccttagtacatctaggagccttctcatctttggttccattagggaaattaagcatagattgcctcccatccaagattggaatttttgttaataaaaattacttctactaagtataagaaatttatttttcatatatgattaagtaataaattagaacacacaggaaatatgtgtttaatttttttccagaggaatcagatccaaagacataggaaaacattttactcataagacccctcataaaaagtagagtgtttgaatttatcttatattgtgttttggtttttaaaatagtataaatattgtttttagagcagtttgatagctaaataactccatgggaatcccagcacaatatggttcataaatactggataaagctacgtgatgttcataaagtcttttctctgacatccttacatgctatgttagtattaaattcataaagacagcaatgagatttaaagcattgcttgttcagaatattttccagtaaaataaaggtcttggtattagagtacatcawrgtaggagaagagaaatttctggtgatttaataaccactatttactctgaagaagtaggaatcaaataaagtcctcatcatcataatgctgtcccaggcactgaacaaagataactacaggatgtgccctttgtccttcaagagattacaatctgagaacatttattttgccttaaagaaactgatttaagcaacctagcacagagaagaagtcacacacagagttcccaggcagttaaaaagtcggtgaaacagaaatggaagagacaggactcatttcatgtacatggcaatagaaaactttyaagagtatgaagacttgatcttttcacctgtgttaaatactcataaggcacaaaataacttccttgatttctgttcaaaattttcccactgcagttcactatctttgcttctcttcttcctctctcaatgataaactgctaaagtaaaccatagaaagtgagacaaaaatgtatttgttctgggaatattagagccaaataaaacacattattgagagcagatgcatgcaaaagacaatgtagagagaagaatgtacatcatggtagagacaaagagaaacaacgaaacaagacctggacatgacctcaatagagacatattaagatgttcaatgaagacatgattgccaaaacctaaacattgaaacaaacagaaatcctaacacaacacaaacaattaaatctagtttgttcatttgatagaataatacacaacagctataaggcttaaactagacctgcaggcatacctcagagatattgtgggttaggttccaaatcattgcaatgtagagagttatacatattttttggtttcccagtacataaaaaagttacatttgtactgtattgcagaatattaagtgtgcaaaattatgtctaaaaaatgcacacattaattttaaaatattttattgctaaaaaatgcttactatcatctgagcccttcagcaagttataatctttttgctggtaaaggtcttgtttcagtgttgatggctgctgactgatcaggtgctagttgctaatggttgggatagctgtggcaatttcttaaaataagacaacacggtgggaggatcacttgaggctgggaggttgaggatgcagtgagccatgattgtgctctgcattccagcctgggcaaaagagcacaaccctatcactaagaaaataaaataaaatatgaaataaaataaaactaagactgcaatatcatatcgactgactcttcctttcacaagagatttctctgtagcatatgatgctgcttgatagcattttacccacagtagagcttcttttaaaattgtttgctaactaagtttacaractattctaaatctattgacatttcaacactcttcacagcatcttgaccaggagtagattctgtctcaagaaatcactttctctgctcatccttaaataataagtcctcatccattaaagtttatcatgagattgcagcaattcagtcacatcttcaggctccagttttagttctagtctcttgctatttccaccacacctacagttacttcctccactgaagtcttgaacttctcaaagtcattcatgatgattcaaattgacttctttgaaactcccgttaatgttgttattttgacctcaacccacaaatcatgttcgaaatggcatgtaggatggtgaatcttttccagaaggttttcaaattactttgcctggtcatcagagaaatcactgtctatggcagatattgccttacaaaatgtatttcttaaataataaaacttgaaagtcaaaattactccttgatggttgcaggtactcccttctgtggaaaaaaaaaatactccttgatccatggctgcagaatgattacgttagcatgaatgaaaacatgtgcatctcttgaatctccttgtgcatctctgtcaaagcctttggatgaccaagtgcatgtcaatgagcagtaatattttgacagcaatctttatgtaagcagtgtctgaacagtggacttgaaatattctctaaaccatgctgtaaagagatgtgctgtcatccaggcttttttgtttcatttgtagagcacaggtagagtagatttagcataattcttgagggccctataatttttgcaatggtaaatgagcattggcttcgacttaaagtcatcaactgcatcaacctctaacaagagagtcagcctatccttgaaattttgaagccaggcattgacttctcccctttagctatgaaagtcttagatggcatcttcttccagtagaagtttatttcatccacattgaaattctgtttttttagtgtagctgctctcatcaattatcgtgtctaggtcttctggataacttctggcagcttctacatcaacactttcctcatcttgcacttttgttttatggagatggcttctttccttaaacctcatgacccaacctctactaggttcaaacttttcttctgcaacttcctcacctctctcagccttcatagaattgaagagagttaaggctttgctcaggattaggctttggcttaaaagaatgttgtgggttgcttgatctatccagaccgctaaaaatttctccatatcagcaagaaggctgttggctttctgtcattcctgtgttcactggagtagcacttctaatttccttaaagaatgtttcctttgcattcacaacttagctaatgttgatacgagagatctagctttctgcctgtctctgcttccaacatgctttcctcacttagcttaattatttctggctttttatttctggctttttatgtaaagtaagagacaagcaactcttcytttcacttagacactcagaggccattgtagtattctacttggcctaatttcaacattcttgtgtcttagtgaatagggcaacctgaggagagggagagagacaggagagtggccaatggctggaacagtcagaacatacacaacatttgttgattaagttcaccatttcatatgggtatggtttgtggcaccccaaaacaattataagagtgacatcaaagatcactgatcacagatcactctaatagataataataagttaaaaatggaaatactgagagaattactaaaatgtaacagagacatgaagtgagcacatgttgctggaaaatagcactcttaaacttgctcgacacagggtwgtcccaaaccttcatattgtaaaaaacacaatgtttgcaaagtacaataaagtgacatgcaataaaaagtgtaagaatgtatatgtgttagcataggcagattgaaaacatatttgagtggaaaaaaagaaaattgtaaaatgaaacacacaccatactcttaaatatgtaataacaaaaacctgcaccaaaaattttataaattttcttgcacatatttggagatataaactgtctttgtgttttcccctaagggaatgcacacaaatcaggcaaggatggggagagtggaagatagttgtsaagggactcaaccttccaatctcatagtctcattatttaaaagaccaaggcaataaagtattgcttgtgtaataaaaatttgaaaaatgaaaataaaagtaaataaggsttaggaggcattttcagaaaagcagaagtttgaatcacaaactcaggctggactctaaatataatgcatggtatctcttcataccatgcattggaaatagaagcactggattatgatagtaggaaacatgtaaataactgctcttcttttgagtctatgttcacctacttcttatagtttgatctatgcccccaaggaaagtatatgcttagcttggcaggatgaattcacttgttagctgagtattggatgcttaccgtgcaccactctctgctctgcataatgggaatacaacagtaaacaaaacaacagaatctttccctgtgaaacttatattgtagtgtaatatgtaaaaatgttagatggtagtaaatgatatgaaaaatacaacagaagggaagatacaaaatttgagggagttatttggaatgaaatgtaggcacgaggattattaagttgttacaggttttgaatcatactctgagttaaatgagaaacagttgccaagttttaggcaaaamaattattagtacctctttggatgctgtgttgagaatagagcaaaacagagctggggtagaaatggtaagaattgttagattactatagtaatccagacaatagaatatggtgctttggaccagtgtagtagcagagggatgatgagaaatgttcaaatcaagatgtgttttgagtgtaaagtccataggatttgctgtaggatatcctatggatttcacggggatactttactccagagaatttagttatattagtacaaataagcaatttgaagttttagrgataagcatcaaggtctatattaatttaacttagggaacaaaaagaaaaactagaatatgtggaaattttattttgatcctaaaatgaatgtctttttawttaaaaaaaaaagctaatgcwttaatataacattttggactttgattttaaggcttgaccataaatcataagaacttaagcagagcctcctgttgaattagtgatacttgaatattctcactatgttactgtgtttcttcactcatgagacactgatttttttctcattttaacaccgttgaaatttgatgtgtgttgaaatcaatagtgtctcccaacagcaatcagccagtgaggataattccattacttatttatgggcaaccatcaaaatgccagayaaaaacttgcagaaaakgtagcagtggcttgtaggaaagcccagaaataattctggagagttcttttaaattcttagaaactatgagtaaagaaattgaattagacagtatttagtaaaattcctgatgtggtatttaaaagtaagctagatcatcataattacaaagttgtcttaagaacccattactaaagtgttcttctatatatgattttaggaaatactatattatcaatgtttttgaagatgatatcaattgctgaattgaaaaattacttagaaaatttgtagtctaattatgtaaaatttacaggaacaactcaacctgtttcttattcttgataaaaatataccctttaaaaagctcttttagtatacacatataaaatacaaatgtaagtgacagtaagcattgaattttagtttaattggaagcatcttttttagaagtaacactgcatcctagagtgaatggtgcttcagagtcaagaagtacactatgtgctttaaagtaatcggttttttttaatcagaagtgagatcaagttagctttagagactgtaatatcataggaagtgcactgagtcataattaagaggtctagctgtgacattaactttcagggaaacatcacgtgacaccaaaatatttattttactggtctctaatgcaaaaatgaaaacaattgattaggaaatacattatctggtagaaatcattctgtaaattcacttcgtgttccaaacatgtttgtggattttttgcatggcttcttatatacaaaatagtaatctgcatggcacataacgtttagtaatcattttaccagggatatggcaatgaagttcaaaatagcaacttttgaattaactatctagaaaagctcaaatatatagcatcaccccttaagtcagtgaagctatcttttcaggaaccagagatagtataacwgttttggaaaatacaaaaacagataaataagtccatctgtttctttgataatagaaaaataagtacaattaagtggaaactgtgagccaagtgtcttttttctgaccaccacatattaagtaacatcctagtcactctctgtcacctgcttctgccaatgacctactcctgtggtcatagcatgcattatattaacattttaaattatctctttactttgtatggtcattctgtctctcaagagcataatatctgtaagaacaaaaactggtcaggtttctttactgctatatgtttggctcttaggaagtgcctgagatacaagaagtttccaatgaatatttgtggtatgaatgaaaaaatgtggtgtttgmaaagagctttgagtaaaaaatctaagtacaatataaatgtaagaatgttgttaagaatgagaaagggaaggcatgaatcttagcctatattttcaaaggcacacagtatatatgcaagtatataagtggctttgttcccacatcaggatatatgtactggtatatatactgtatacatacatatacagtatatatgtactggtatatatcagtatatatgtacatrtatacatatatacacataaatatatatacagaaatatatatatatggagagagagagagagtatatatactgatgtgggaacaatcccacttatctgtggtgtccaaggagagaggtgttttcaatctaaaggataaggcaggggctaagaaaatcaaatttgatctttctcttattttctggtttctcttgtttttcattgcaccctgacatattttaagataaattttgatgtcatatattctatgacatggaacaatttggtgatggctttaggaagaattttgagagtaatttttatatcatacttactgaaacttaaattactctgctgtcttttgaattgttatagttatatatttctattataaaatcacaaaaagagagttttttatactgctttgaggtttctcccattgcttaaatttagaatacaggttttagttatgagtaaaattatttatttattttctaaacactttaatttgaagaatttgctatttaacctttagatttagagctcttcatcaaccatctgtgaaatatttattaataattttatgtgcctttgtgtttgtagtcatgcttgaccttaagaaaaacacttttgcaaatagtagtgagtgaataaatagtatatgcacactgacatttagataaactcatctttgaaggacttttttttggcaataactactgggtaagtgtacttcacttctggatatataactaagcacagttacagaactgatcaaatttttagttgttaaatagctatttttaatatatttctctcatttttaatgcagagagggcattaaaaatgcccgtcagttaatatttagaattttccawatttaatctcatctcaagctctaagattacttccactgagataaatagtaatacactaagcatgttctacaataatttaaaaaaagatgaatgttccctttcttgtctctttctctaagtgtaaattattcaggccataataatattactaagaattaacacttttgtgtcctaattacatgtctctaaacactaaatatgtaatcacatgtaactccagcactacatactctatttatatcacttcatttaatctcaaacaatcctatgaggaagctaatattttagaatctaggaaaaaccatatggagaggttaagaaacattccccagattaagaaactttaaattcagatctttccaactctactcccaaatcttaaccatgacgctataaagaagtagcatgcaataacaagataaaactttataaattatagaataattttgttatagtggaaatgtcaatggctgattaaaatgtatttctattgttattcctaacagtcctgtcttagaaaatctgacttgagaggattgaacctgatccatatttgagaaaatactgaggtatatctgctaccatgctaaacagatctgtaaattgaatgaggtgatctccattatatctttcattatatgtttgtttaattctaagtaaaataacacactatgtcattaacataatataatttggctcaaatacattagcatagatgattcctttgacccacacaggcatttttaaattattagtcatcttgtaactagtcatactaaacatgtttgaatatacaattcattcaaattaagctacagaacatcttcatagtcttacctacagataacatttrcatgtaataaatattaaatatatatttttaataaatggacaacagtattaagaacagaaaagccgttgttcacaaaaagacataaggcatacctagttatgaaatatttacttgtttgccctgcagttgtcttaaaatgaatttgtaatgtgtgataggctgaaaaaatagcccctcaaagatgtccatgtcctaatcccaatccctagaacctgtgaatgtgttaccctacatgaaaaaaggaactttacagatgtgattatgtcaaggatcttgaggtatggagattacattgaatcgtaagagagaggaggcagaaagaacgaagtcagtaaaaggagatgtgataatggaatcaagggttggaatgatgcactttgaagacacaagaagaggccagaaatcaaagaatgcagtcaacctgtaagtacaggaagaggaaatgggattctcccctgaagcttccagaggaaacatagctttgccaacaccttagttttagacttctgacttccagaatgttgagaataaattcatgtcattctacatcactaaatttgagataaattcttgtagcagtattagaaaactagtaacttatggttgttaaataggacttctcagagttgcacctctggccaagatttgccatcacaccagaaataatcaaaccaaataaagcaaaacaaaaatgagcaaacaaaaatacatgaaaaacagttttcaaagtactggacatcaaataatgaaagacagtcatttcttccaggcaaatgaaatgaataaacatattaattgagccctgtaattttcctagtttgctgtcttcagagaaatttcaggccatggcacagaaaggaggaaacttggtataacatggagarctcactgaattgtggagacagagctaagaatctgaaaagaacgtaacagcaagatttcacagaacagagtgtctgaaaagtgagaatagcttcccagacatagagctgtgggagagctggaaagaggaaactgcctgaggctggggaaatgccaaccattaattagaaagaatagggcttggaacacacacagctgggaactgtgtccaactcttccagacacactggataaactcataatacatgcgatagagaactcagaaagtttatcttggtagttgggaatatatacctatgaactgagcactgctctaggcacaactaacaaattttaagagcaatacctaagaggaccaaagttctttgcaggtaacttctctgagtccccaaagctcaatgagatatcactatgtatctattagaatggctaacataaaaagtagtcaaaacaccaaatgttggtgaagatacggagaaattgctggtggaaatgtgaaatgttaatggccgttccggaaaacagttaaacaatttctgaaaaaattaaatatgtagctgccatacaacctagcaactgcatttctgaatatttatctcagcaatgtgaagactaatgttcacacaaaacttttacattaatgtttatagcagttttattcataataggcacaaactggaagtaacctatatgcctcttgctgagtgaataaacaaattgtggcatatttgcaccatggaatgctacttaacaatacaaagaataagctattgatacacacaagaacttgaatgaatctccagagaattatgctgagtgaaaacatccaatcccaaaaagttacgtactgtatgattccgtttaaagaacattcgaggccgggtgtggtggctcatgcctgttatcccagcactttgggaggccgagggaggcagatcacgaggtcaggagatcgagatcatcctggccaacatgttgaaaccccatctctactaaaaatacaaaaaattagctgggcatggtggcgggcacctgtagtcccagctactggggaggctgaggcaggagaatggcatgaacacaggaggtggagcttgcagtgagccgagatcgcgccactgcgctccagcctgggtgtcagagcgagactccgtctcaaaaaaaaaaaaattcgaatattgttgaaataacaaaatgtcagaaatagagatcagattagtggtttccagttgtaaataagtgggtggagtgaagtggatgtggatgcaaaaaacaactgaagaatctgtgtggtgatgaagaatcttcctgccaggcccagctgcctgccccagcacaggccttcccccaagtaccctggtctccactgccaggacacacttgtttgacgcctggtttcccccatggctgccacgctgattctccgttccgcacatcgtgtcccatcaaaatgcatgacagtaccactccttgtgtttaaaagagccagttattttgtcaggccgtgatgactgcctgctgaacagaaaagtcgacgccgttgtctctgctctcagggtgttcatagtatagtggggctggcacacaggaaccaggggtatatcttgagctctatatcttggctctttcaatgtcattatcctggttgacatattttcctgtacttttgcgatatgttagcattggaagagtctcaattaagaatgcacagaatctctcaacattacttcttacaacttcatgtgaatctacaattatcttaaaataaaaagtttaattttaaaaagataactggccaattaaatcaaaatagaaatagattttaaagtttataacatatatttataacatatgtatttgtatatacatgtacatatatgtacatatatttataacatatgtatagatacaatagatgccaacagggcaaatggaaatatacaatttaaagtttattattctataggtgaaactgataacatcagttgaagacagactgtgataagttatagatatgagctataaatcctraagtaactataaaataacgaaacaaaaaattatagccrataaattaccaaaggggataaagcagaatcttaaaaacaattatttcccaaaaagtgagaaatggaaaaatacaggataaagaacacaagggacaaagtgaaaagtgaaagcatcaagataatagacttgaacataaccatgtcaattttacattaattgtaaatagtctaaatgctctttcaagacactgttaagcaaattaatttttttcacttgtaaaatgtattttaatttaatttaatttttcaagttccagggtatatgtgcaggatgtgtaggtttgttatgtaggaaaatgtgtgccatagtggtttgctgcacctatcaacccatcacctaggtattaagccccacatgaattagctatttttcctgatgttctccctctccacacatcctcctaacaggccccggtgtgtgttgttcccctccctgtgtccatgtgttctcaacgttcaacttgacaacatgcaatatttggtttcctgttcctgtgttagtttgctgaggatgatggcttccggcttcacccatgtccctgcaacaaacatgatctcgttcctttttatggctgcatagaattccatggtgtatatgtgccacattttctttatccagtctataattgatgggcatttgggttgattccatgtctttgccattgcgaatagggggatgaacatacacatgcatgtatctttataatagaataatttatattcctttgggtatatactcagtaatgggattgctgggtcaacagtatttctgcctccagatctttgagaaattgcygcactgtcttcaacaatggttgaactaatttacattcccaccaacagtttaaaagggttcttatttctccacaactttgccagcatctgttgtttcttgactttttaataatcgccattctgactgaagtgagaccatatctcattgtgattttgatttgcattcctctaatgataagtgatgttgagctttttttcatatgtttgttgactgcatgaatgtctacttttgagaagtttctgttcatgtcctttgtccattttttaatgtttttttttccttgtaaatttgtttatgttccttgtagactctggattttagatctttgtcaggtggatacattgcaaaaattttctttcgttctataggttgcctgttcactctgatgataattcattctgctgtgcagaagctggttaattagatcccatttgtcaatttttgctttagttgcagttgcaattgctttggacatttttgtcgtgaaatctttgcctgtacctatgtcttgaatggtattgcctatattttcttctatggtttttatagttttgggttttatatttaagtatttaatccatctagagttaatttttgcacaagatggaaggaaggggtccagtttcaattttctgcacatggctagccagttcacccagcaacatttattaagcagggaatcctttccacattgcttgttttagtatggtttgtcaaagatcagatagctgtagatgtgtggtgttatttctgagttgtctattgttttccattcgtcaatgtgtctgtttctgtaccagtatcatgctgttttgattactgcagtcttgcagtatactttgaagtcaggtagtgcgatgccaaagctttgttctttttacttaggattgtcttggttatgtgggttctttttttggttccatatgaattttaagtagtttttttttaatctgagaagaatgtcaatggtatttagtgggaatagcatttaatatgtaaattactttaggcagtatggccattttcacgatttgattcttcctatccatgagcatggaatgttttctatttgttcgtgtcctctctgatttccttgaggagttgtttgtagttctccttgaagaggtccttcacttcccttgttagctgtattcctagatattttattctgtttgtagcaattgtgaatgtgagttcattcatgatttggctctctgcttgtctgttgttgatatataggaatgctagtgatttttgcacattgattttgtatcctgagactttgctaaagttgcttatcagcttaagaagcttttgggctgagacaaaggggttttctagatatgggatcgtgtcatctgcaaacaaaggcaatatgacttgctctcttcctattttaataccctttattttttttctcttgcctgattgccctggccagaacttccaatactatgttgcataggagtagtgagggagaacatccttgatttgtgccagttttcaaggggaatgcttccattcagtgtgatattggctgtgggtttgtcatacatggctcytattattttgaggtatgttccttcaayacctagtttattaagagtttttaatatgaagggatgttgaattttatcaaaagcctttactgcatctattgagataatcttgtggttttcatctttagttctgcttatgtgatgaatcacatttattgatttgtgtatattgaaccaatatagcatctctgggaggaagccaacttgatcatggtaggtaagcttttggatatgctgctggattcggtttgcctgtgttttattaaggatttttgcatcgatgttcatcagagatatgggcctgaaattttggtgtattttttgttgttgtatctcttctaggttttggtatccggataatgctggcttcataaaatcakttasggaggtgtccctccttttcaactgtttggaagagtttcagaagaaatagtaccagctcctctttgtacctctgataaaattgagctgtaaatccgtctggtcctgggcttttttttgcttgtagactatttattactgcctcaatttcaaaactcattattgatctattcagagattcaacttctacctggttcagtcttgggacagtgcatgtgtccaggaatttatccatttcttctagattgtctrgtttatttgcatagaggtgtttattgtattctctgatgattgtttgtatttctgtggggtcagtggtgatacaccctttatcatttgattgattgtgtccagcatttttttaaatgaggcacagactggaaaaaaagtataaagcatattttattttattttattttaatgtttattttgttttgtttttttctgttgcccaggctagagtgcagtggtgcaatcatagctcactgcaacctcgagctcctgggttcaagcaatcttcctgtgtcagtctatcaagtagccaggactacwggtatrtgccagcatgcccagctaattttattttatatcttgtagagatggagtctcactgtgtttcccaggctagtcttgaactcctaacctcaagtgatctgtctcagcctctcaaagaattgggattataggtgtgagccatctcacccagcctgtaaagcacattttatataaagcatatattttgaactattaaaactcaataataagaaattcaaaatttaaggaaatgtgcaaagatttgaacacttcaccaaacaagatggcatatatgcacatgaaagatgcccaacatcattagtcattagggaaatgcacgttcaaatcataatgagataacattaaaagtgtattagagtgcctaaaatttaaaaagactggacatgacaaacgtttgagaggactggaagtttcataccctgctggtgggaatagaaaatggtacaaccattttgagaaacaatggcatttttttttaaaggtgaatatacacctaccatatgactcagacattttacacttacgtgtttacccaagaaaagtgaaaacatatgttcatacgaagacttgtatatgagcgttcatgataactatcttgtaatagccaaaaactggaaagaatccaaatgcctaccaaaggtgaatggataaacacattgtgttacatcaatacaatgaaacaccactcagcaataacaggggtgacccattggtacacacaacaatataagtaatctcaaaacattatgctttatgaaataagccagacaaaaacataggcttactgtataattccacttacatagtgcaaaatgatggatttacagtgacagaaaagcagacagtggagagaacaakgtacagaggggcaggagggargcattagacgtgtgcattagaaaacttttagggatgatggatttgtttattgcttggttatgattgtaacggtttcacatgtgtatatgtaggtcaattttttttcaaattataccctataattgtgattcattacatgaacaaaaaatgaagttttaaaaatcccatttacaataccatcagaaaacaaaaataatgcatttaatgagatgtgcataatgtctgcacagaaaactcaaaatatcttcagagagaaattaacgaagagctagataaggaaaaggatttaccttattcatagattggaagcctcaatatctttaagctctcagtgcctctcaagttaatctgtagattcagtgctatcccaatcaaaatcctagcaggatttttggggagtaaaaattgacaagttggaaggtgctagagtaactgcatattcatatgggggggaaatggatctttccctccatctcacacaatacaaaaaaatgcatagacaaattcatagagacagaaagtagaacagtggttatcaagagttggggtgatggtggaatgggtaattattgtttaatagagtttcagtagggtttgatgaaaagttctaaaaaggaatagtgatagtttcacaacagtrtgaatgtawgtmataccaataacctgtacacttaaaaatggataaaatagtaaattttatactatatatattttatcataattaaaatgaaaaaatagtttaggctttgaaaagcagagtggccctaaaagcaacctctcctaactaatgtgtggtttctcaagtaggatagagaaaccgtttagcctctcttaaaggcttgggaaagatattgagcaaaaatgtgctttggacttgaaagtatacattgtactgatggaataaaaatatatagcaagtgtatgttgaaaatatgtgcttagatctaagaaaaaataactagcaaaaatgtgttgaaaatatgtacttagaattagtagaaaatgaaataacatagcttccactagatgaaaacctctagagatgtcacatctggcttcttgtacaatttcatcagtgtcatttatgaacaattccttcagtgatcaaaacatgttttctgatggatatgtttattatcttgatttgtgatgatggcttcaaagagctatatgtgtcaaaatccatcacattatggactttaaatttgtacagatttgggttttgttgttgttgttttgttttggttttttttctaagacagggtcttgctttgtcatccaggccagagtgcagtggcacaatcacaactcactgtagccttgacctcctaggctcaagtgatcctcctgcctcagcctcctaagtagctgggactacaagtgcatgccaccaagcccaagtcacttttcgatgttttatagagatgaggtctcattacgttgcccaggcttgcctcgaactcctgagttcaagtggtcctctcaccttggcctcccaaagtgttgggattataggcatgagtcactgagcctggccaatatgtacagtttaatgtacatcaattattcttcaataatgctgtgaaaaaataatttttggtggatgacagacaaagacataaaagccataaatataaaacttctagaataaaagaataatatccctatgactttctgtagacaaagatttcttaggcagagcacaaagatcactaataataaaatcagaaaaagataagatctagacaacaaaataatatgtgcttattaaatgaatcattaagaaaatgaaaaagtaaaccacagacctggagataacattggcaatgcatatttctgataaagaatttgtatgtagaatatatattaaaaaaatctctaaaacccaataatttttttaaaagcaagcacaataaaaactggcaagagatttgacacttccccaaagaacatacaactggctaataaaaccacaaaaaaatgtacaatattattagtcatcatggaaatgcaagtaaaaaccacaataagaagtcacttcactagaatgactaaaatttaaaagaatggaaataccaagaagtcataaacatgtagagatgctggaattcccacatgtcactggtgaaagagaaactgtaccttcgcttggaaaactctttggcaaattgctgtaaagcagtacctacttcatgacctagaaaatttactctcagatgttttcccaagaaattaaaatttatattcccagaaagacttttataagaatgtttatcatagctttatttagaatgctaaaagctggaaacaaagtaaaatgtgaaagagtaaacaaatagtagtcatttatataatagcagactrttcagcaatataaatcaaaatgtgatcaaggcacacaacagcatggatgaatctcacaggaattatattgggcaaaagacactagatattcaaaatttcatttacagtcagttacagagaagaaaaaaactgatgatagagattagatcaatgttcaccaggcctgggaagagattgagtggacaggtacatgaggaaacattcagaggtcacagaaatgttctcagttgtagtggtagctacataggagcatatatttgtcaaaactcattgaaccaatcacttaacatctgtgcatgttatgccaattatgtcttgtaatggttaattttatgtgtcaattttgaggtgtttttggataagattaacatttaaatttgtgaactctgaataggggatactgcctcccataatgtcattgggcatcatctaatcatttgaagacctaaatacggcacaaagataagtcttgctgatcaagaaggaattctttagcctactgccttcagacttcatttgcaccattggctctcctgggtctccagacttctagcccacactatagattttggatgtgccaatctccataatcttgcaagctaattatttctaataaatcagacagatagatagatagatataattaataggaagaaagaagatagatacatagatagatgattcataggaagaaagtagatacatagataggtaaatagatagatagataggtagatagatagatagatagatgatgtgaaatatgcatgcatcttctgggttcagtttctctggacaaccctaactaatatataactcatatccaggaaatagtatagaacaaattctttagaaacaataggttcattctttaagaaaattcttgtaaagtcaaaagatttcattccaagctaacttcagagtgtgcacttcagagattaccaaaaatattgttgatttttccttatgaatcttgaatatttctactactacaaaaatcaagtttggaatttattcttctgatcccatcaattgaaccaccccaacctcctccttcctaaagtttctaagtcattttcctccattaaatctatttctaagcagttatttcagtttgttgttactcctagatcatcatttgcatggctgtgctcctacagcagagtctgttgttaggccatgacccatctggtatctcacagctggaagctcttggartctaacaaggaccctctctcgaaagcagatgccaacatccgcctccccaaaactgttcctgaaatctctgttcacctgtttggcttttatctactgtttctgctgagtttcttggaatctcgctctgtaggcatcagccgattcttgagagaaatttgcatgcagatttttaaactcacttttctgaagtttcctctctccaggacttttttctcacaagttctatccattttcccagtaccaaacacacgcctgtaaaattggccatttttggcttgggctgtattcgcttgaactgaaagttggcaaaagccttgagaggagagagccaaaatacctgcatgttactgtttttgcttcccttctcttaagaaaaagagccctacatcttatctttcttagttctctctaatgtcttttaatggttgctttaaatagtttctctatatttaatcattgccttcgtggacatgttggatagaactaggggtaaccacagcaacctttaaaaatataaattacataaagtcacctctagccttaaaaccctttaatggtttccctgtaaacttttgaacaaattcagatacgtagtcttgacctagaaggggcttgtaatctaaaccttgcctgtcttacctagttcacctacagccactgtcccattgttttcacatgtccctccttgcaagtctttaaacaagctccttcctgcctttatatttgctgtcctctcacctctatcggaaacactgttctctaattcttttattggttaatttcttctccttcccatgactgatgtaaatacaacttttcagagaggttctctttgaccatattatgtaatttcatagtcctttgtttttcactatttctgcacactgttttttaccttttgctttcagtgtatatcacaatataatgaatcacgggcgaagtcatacacaaagaagtggggcaaatgaaccaaaaataaggatttagctatgcaggggagaatataataacatctgcaaagtcagtttacagagcctagtgcggatgtgaaagttcatgagaggaagatgagaaaaatgaaaaagggtgtagatgtgagacccagtccacagtgttctgtgcaataaagagatttgctttcactccgtaatttattatccaaacgagcattaattagaacttaagaccattctctgaaaaactataatcgaggtgttcttgagtacctgaaagagacattctgtgcatttctctgattaattttcaaaggatatactcacaaaacaagaaatttctgatttaaagaatatgggcatatttaaggcttartattgtaatcgtcaaagtattctaagactgaatgtgctgatttacaaataactggtatcatgcaagagtgccagtgttttgccatatcgtctcccatataggatattgctgctttttaacatttttgttagcttaatggaaaatgacactttcttttatttacaagagaaattcaatatatttcttatatttattaattgtatttcaacagttatgaactttttgtatacctgaaccacttttatatttatacacacattgtttttactaaattcaaataacttttcatatattattgcaagttttgaytgatggtttcaaatgaacaattaaaaaaacatgaaatgattctatttttatcaatatttaggccaaatttgctttgtgtatctctagctccttttacacaagtgaagaaaattaacattttaacagtgtcctttcttctcaactcttttgggcaattaatcaggttttttgttctcaaatataaactgtctccaaagtattgcacctattttgcagtaagaatagtaggtctttattacatatatagtatatagctttaaagttttacttttaattatattctaacttttgccctattaaaagtttttattttatgtggataaatctatgtctttttcctttatggcttctcttgtggtattatacttttaaagtatttccttatcctaaggtgcactcaatttttttagtcactttaaaatttcatgtcttaaaatattaaatacatctagaatttattttgacttatgcagtaaaatagggaatctaagctacaattacctaatcatcagccaattatcactatatattataaaataatcttttatctccatagctttaagatgttaatttttaaaaaataattaatataaatacaaaatatgtatatactgtataagaattccatacacccacacacacctggatctgcttccaggcttatttctctgctcccttcatatacccactaacatttataatagtacttcttaataactaattgtaaaatagagtaaaattaaaaatgatatgtcattaaatttttacttaatatatgtttagtaaccaaactaaataattaagtatggtatatracatctcaactttacatatgtatcttaatatatcttaaggcaaagcacctttcacggtccttcttttcaaaagctattgaatattttactttctttattcttaaaaatgtgcaatattaaatgattatcttaaaccacattttagaaagtcacatttgatgtaaaattgagagtcatctggagtttgaaataaatataaggaaagaaatgtttcctgtagaattgggataaaagtagatttgaaggattcgttcaacactgttgttattcatcctctgctgtgctgagaacacagaaacctttcagtaaatatttattgattgattcaaaaacatatttgaaggcttttaaaatgtgagctatttgtccaagctgtaaaaatcaaattacacaaataaaaaatacccctttacaatttttatgacacgtgtgttcaatcagtttgaatcaacaattaatataatatacattggttactcgtagaaatctcagttgttttagagtatatagaaagaagtagaagatataataagtctgtcttctcaaagagtttgtaatcaaatcagagaaatatgtaatgtgcattcaaccgttaaaagaaaattaagaattccgagaagagagaagtttgtaatgtctggaatctcacagtttcctctctttgccaaaagaacaatactcttttccctcaggtacacagaacaataggcaggtaaactatacagcagagattttctcccctaatgcccaggaatcctaatgacagaactccagtgagctattcccatagaaataagtagactttgtggtttcaatgacaactattttaggttgaatcctttttgaagagactttcaactgtaaaaactgaaacatgatgtttcaaacttttttacactcttgtgcattttccttttctaaaaaaagcaaacaaacaaacaaccccccccccccccgccacttttttttttaattctgttttgaggcaagaggcttgggttgttgacrtggatatcaatgtaagtattcagttgggtattctatagtttttaatactgcccagctatttaggataactattttctatktatctattttcttwaatgacataataacactaaaagcacagcttattttattattttgtcaatttaatggaaaatgacacttccttttaattacaagagaaattgaacatctttttctacatttattaattgtatttcaacatttatgaactttttgtatacctcaaccacttttctatgtttacacacattgtttttacyaaattcaaataacttttcatatatcattgcaggttttgattaatagtttcaaattaacaattaaccatttttagtattgcccagctatttaggttaactattttctacatatctattttcttgaacaacatagtagcattataagcacagctatacaaaagaaacaagaaaggaaaagaatattaaatatattcaggcttactgtgtgttgtgtctatagacatgaggcttaggcctcttcaagggaatatacagttaaattgttttgacttttggtaccctccaccaagacatatgcaagaataaagcagagcagttaccaagctaataacaaaagttatgttcaggctcaaatgtaaataattgaataatacttggtagttttattgttaacatatgtatgtcatatgctttttaataatctgtaatattttatatttgcttggagaattcagttcaaaacaaaaagctttacaatagatatgtcaacttgagcatcacatttcatattttatcctgcaatgtttatgaattctctgctccattaaggcttcaccttaataaccttagaaggcctcatgagattatccattttagtgcctgttggttgatatctatatctttcagcaacaaatgcttttattttgaaattacttattaaggggttaaattatttcaccatacgcagagaataaacacctatttttcctctgataaaataccaagaaaaaaataaagaaataggtggatttatggatgtgtaccaaaacatcactaaagcttagttgattctgcttacaaagctaccttaataatcggtagagatcactgccacattgacttgatgatagcagttgatgtcaatagtaaagacaatcagaatcattctctcaagtatattgcatcctacctcagttaaccaacctagacaggcatggttgcagataccaagctctgtctatcattctctttttccttcattttctctgcaaatattttatagaacacagattgcatagcccacttttgacattagagtttcagtaagaaaatgaaacactctctttctcttccctagtcctaggtcaggatgggtggagtgggcctgagacacatgtgtcctcagtaacttcttcattttgatatgtggcaatgactgaaaatgaactaaccagggtatctaaaccccaagtatcacctcttgtactcagggtgaattgatcaacagagttcatgctccccagggaagccctgtaagctaaaaggtaacaatttatgatggtacaaattatttcataagttacagccttggttttagtagttatgcttctgatcaattcacaaagttgtattcagcatgtatccagcaactaagacaaagacctttgaacttcttaactctttgtaaaactaagttctaatccaagtgataatacccagtcttagtgatcaacaggagcttgttccatagcttcctattccagtccacccctgcctataatctctcccagagaactctccacaaatagaacttctggaacaagaagggtgttctttatcatcttctgtaaatcaacttagacatatttctgttgatatcaaaattatgacactgagctacttgtcagagtggcagcctcttattcaatgttctctccgcctacattcataccagtagcacgtggtattgatagcgctcttcacagagttaggagaattacgtgaattgatacatgaataacacttagaacagaataagacctcactggacattaataggtgactccttggctttttgctgtggctgttgtcactacatgcatgtctgcctcaccttctggcttcctctccaactgccgccccccaaaccatcrtttggaccattgcagctacaaacctgaaggcaaccgggagtggagtgatgggcatgagacaaatacaaccttcactttaccattttgacactggagtgaaaaaggtcctcctctaaacccctctatacagtattgtggctggattgcagttttacaaaaggtaaactgagagttcatgagtaaccaggtggtatacaatcagcagttatttctaatggctaaacgcttgtggttcttttcaaagtccaccggtccaggacatattcaggggaaagcctagcactcaaggtgacaacttgcttacaactgctaggggtcagcttagtttttaccatcaaaaaagcagtggagcattctcttctaggttcaattattatgaagtctggggaggaaaattctcccattacccaaacccaaggcttgtatcctgaattctcatttcttgtcccagattctgtctttcctctaagtcatcctcaacaagaactcatttctgcagtataacaatacagtttaatgtagwttaacccaatctaaatctcttaaagaaaataaatatttctaccatctgtttcctcctgtcttctcaaccaggccaaaaacagcaacaatgtcagcagagatagagctctgactcagacaaatgcacacaattttatattgtgaagctgaatatttagcttctcccgctaaatcatctgcatttaggttaatgggcacttcagttcttcccacagagcaatggttggatgcattagggaatattatgaacatttacagatacattcgctaattattccaaaaattgttttaattgcctattatatgcttggcactggtaaataaaaacaaatatgcaatttttctagaataatgaaaatactaggctgtattttgaagctaaaatctagtggtagagaaataataagtcaaaaacagagtattatgaatattatgaataagttttgtgaaagaaatagaacctgggtaagttctggaaatactagtaaaaaatcatttcattaaatgtaactaaaagtggttgtaataaagataattaaatatgtgaaaaatagcaaatttggcatgcatattgggatagaccttttgaaaacagtattgatttccaggaacaaatagcaaagcatacatcatgtaaacaatgctgtccttatgcaataatcaatagtcaacaagagtagmctgccgcccttcctcacctgctacctgccctattttctatagcttcatccaccttctagcattcctatatatgtttcttatttactgcttttgctatttatttatttattcccactaagttccacaagtgaagggttttcttgtctgatgaataccaaaaacagtgaatggtgccttacaggtagcagtggtagcagtggctcagtaaatatcttaagtcaagccatatgtaagtaaatgaatgagcaaatgaacagattaaaaaatctgatcatttcaagacaaaaaatgtccataatataggatgaattctaaaattaacttgcatttgtgattttaaagcaataagataagtgatcaccaggcatagtgtctcacacctgtaatcctagcttaggagggttgcttaaggccaggagttcaagaccagcctgggcaacatagggagaatgcacctttaaaaaaataataaaaataaaaattagccaggcatggtggtgcatgcctacagtcccaagtattcrggaggctgaggcaggagaatccctggagcccaggagtttgaggctgcagtgagctatgatcctgcccagtctgggcaacagagtgagaccctgttaaataaataacagggtctcattaataaacattaataaaataaacattaataaaagtgactttattaatctttgctatccttccttttacctaaagaagcctggtgtaatttctatagttgatcattttaatcacttatatcttttattaatatacaaggaaacagtgtgaaagaatatgggaataagttatattcccatattccaatttatatgagcaaatgtagggatttttaaaatacgctaatataatagtcaatgtgttcaacaacaactcagcaaatatttactgaacacctactatgtattgggcatataactctgaaaaaaaattttcttacctcatggaaacaaatgtaaaccaatatacaaattaaatcattccagagaattctaaatgaaaaaatttggtggggaaggaattgggatttcacttttagttaaagcattcaaggacgatctcccctgtaggtaacgttagaactgatgcagaatgggaaaattgcacttgctacaaggagattgaagagaagattccaggcagagagaagagtgaatataaaacactagaagtgaccaaaatgggctgtttgaggaatggaatgaaggccattgtatttggagatcactgagaaacaaaagaatacaatgtgagttgaactcagaaagttatcaggagctaaatcatgtaagcctttgatgactatgaatagaatttggccttcatttcctgttcccttgtaattttccggagagtgttgtgctgcaaataacacaatttgattcctacttaaaaaaaatcccagctatatatagacaaaggcctgtacttggggaaagaagtctttatcacatgtagtttctattaaatttctcaatgataaagtataacgaaaaggtagtattgaattactattacaattctacacatgttccctttcatgcattaaaagtcacaatttttgtaattttattcatgtgcatcacaaatataaaacttttatttttatcacttctgtcttcagacacattttaagattgattttatttatttttttatttttttatttttttattttagaactaacctaaattcccctggatgtgggagggaaaattaatgacaattattccagtccaagagtattactttctataaaactaaccctaaattttggtttacttcagccctaagagaaatagcatattaaccctggctgattataatgggtaaacatgatcaatattttactccttacttctcctgaaaaactaaaacctgacaggctaaagtaaatttaaagtctaaaacacaaagctgtaccaaacttagcttgggcagtaagtagatatttttaaacctgtacgacagatgtgactaaaacaattggtcttgttgacattgctacctttgtatggatagaaataaatcttaacaatataatttaccattgcacattttggcaagaaaatttttaccattcatagtcaggttgagcttactctctgtggcaatgtcacagcctacttctgatggaaaacatttttatccacaattgactaagtcatttgtcttagtgagacctcacaggcaatagatggcattagcaagtagatataggaaaactgtcatcattaattatactgaggactgcaatcggggttcctgagtttccagtggcagactcacaaagtgggtaatacaatttgtggatcaaaygcaattaagtgtaatatatagttaatgtctttctatttgcttctttaattgcaagatcaactctgagtctacatgatggtaactagtactcaactaattctttggctgtgtaatctggatttactagtggcattgtatttgagcttcctgaaaagtttcatgacaatcagcagtgtgttatgagtaactttagccagtatctacacaaacaaagtgaaagacagtcaagctagtttttctctgtacatgttgatcatcaggatgagtaaaatttcaaggaaaatttgcagacaaacagagtttacatttttagaaaatttttggctgagcaccgtgcctcacacctagaatcccagcactttgggaggccaaggcgggcagattstttgagctcaggagttcaagaccagcctggagagcatggagaaaccccatctcggcaaaacatgcaaaaattagccaggtgtggtggcatgcacctgtagtctcagctactcagtaggctgaggtgggggaggattgcctaaactcagggaggtcaaggctgcagtgagccatgattgtaccactgcactccatcttgggtgacagaatgagaccctgtctcaaaaataacaacaataataataaatcaatagaaaatattcctgtaaaattcatttaaaattaaactatttatgagtgccaacattaactttagaatatttttaattggataaacaagaatatataaaaaacttgctgcatcttttggccctggtgtaatagatgcaaattcattcaaccctaatggctataaatcaatattaatttgattacttatgcatttaactattgccctagtattttcttctgtggaatttacagtttaaaatgcatttctacttatgctcttctatattgattaggattacagtttgtttcttactagctctgattcaacagcattttgttatgctagtctttccttttatgctcattcacgtctttaatatttttagtctattgagcattgcactttaattttggtcagtctattttccttccctaaaattacactggcatttctactaacatttatcagaatttttacatgctggttcatctacttttcacatttaagaaattttaaaaaagaaatcttatgtggcaaaattctcctctcctctccatacagagatctctgattacataaatcaatgatcaaaaatgcacatacctctcacaaatgctttttctcactagaataaatttaaaatattttgcaaaatgtaaggtagctttttgtagraatcccaagtttaccttctaaaagttacatttataaaacactaagagatttctgcgattcttagaaacattcactatttacttctctcctctcattcacatttataaactgatgagtgtgtgtatgtgtgtgtgtttatgtaccttaagcgttcagtggatttgagagaattagttggctcggcatgattatgtgaaaaccatatttcaccaaacacagaggaacataatgactttcttttctttttttttttttttttttttgagatggagttttactctgttgccaggctggacaggctggagtgcagtggtgctatctcagctcgctgtaacctccgcctcccaggttcaagcaattcccctgcctcagcctccagaatagctgggacgacaggtatgctccaccatgcccggctaattttttttttttttttttgtattttagtagagactgggattcaccgtgttggccatgatggtctcgatctcctgacctcatgatctgtccgcctcggcctcccaaagtgctgggattaaaagcatgagccaccacgcccagccatgacattttttatgtgtatctttccttccttctcttttcctcattttgccattgacctatgaatatagaatagtgtagggatggtagcactgtttaaatatgttagttcttgccttctcccgcacagtataagtacctcaagagatacagagtaacttaggcacattgcaactttgtcttcttggctgtactakgtgtgtgtgtgtgtgtgtgtgtgtgtgtgwgagagagagagagagagaagagagagtgtgtgtgtgtgtgygcgcgtgtgtgtcagggtgaaggtctggggagtgggctgtgaagaaaaagaaaatattagatgtcattaatatgattatagctactcttsttacattaactcacttccttcctgcaacttttgttattattggttgaatctaaagaattttcagactaagctaagcttaagtcaatttgactaccattctgttaaggcagacacattctaacacggcactgctttaatgcataccttctctatttcccacttcctcctgaacaaaacaaaacaaaacaaaagcctttagattcatcaacctgtaatgaggtatgtaaaatactatgccattaacacagtagtgccttgtctcaaggtcactttcatatggctaaaagcaaaatagcacactccctttgactcaaaagagcctacatattccatatggtattatatacataatggaatactattcagcctttaaaagggggaaaattctgccatttgcaataacatggatgaacctggaggacattattctaagtgaaataaccaggtacaaaaataaaaatactgcatgatttcacttacaggtgaatccaaaaaagttgaacttatagaatcagagagtatgatggttaccagaggctgaagtaggtggatgaatggggaaaagagagaagctggtcaaagggcataaagtttcagacagatggaatacatttgagttatctattgcacagaatggtgactataataaataaaaatgcattgcatatctgaaaattgctaaaataatatattttaaatattatcccccctcaaaaaaaaaacaagtgtgtgaagtaatggatttgttacataagctgatttccacgttgtatacatttatcaaagaatcacacagtagcgtataaatacacgtaattattatttgtcatttaaaatatgatttttaaatcatattcacattctgaaggtgagttctttccagatacaagctttctctatccaaaactggtatttcatcttccatatccacagaaagaaaaaagttgtttggaatgaggtcttgttgtgttgcttaggatggtgctaaatgccttgcctcagcctcctaagtagctccacagaaaattttactaagagatgaatgggataggagagaaaggggcactccgtgatcatgttatcatgtgtaaaacctcctgtgaccaagaactcatctactgattctcatctatatttgaccttgctcataaatcaatggattgtacatgttagaaacataaacaagaccataaatatcttaaattaatgcactgatgacagttccatacagcttttcaaaaaaacttcccatgaaaacatccctagacctatacaatattatgtaagtctcccaggaaccctgtgagggagataacacgtcatattattacagataaggtaacagactcaaagaggttgtcttttgacaaaagctacagaactaaaaaaaaggcagattctcagtataaattctgtgtgttctgactttaaagtcatgttctattcaatgtgtcatggagaccccaaagcagatctcagcagagcttggtaatatcagcagcgcacaatggactgacttcagacatgagaaatacagaatgtagcactctctgtgttttttagcagagaaactctacacagaaccaaattaccttataggagaaaaataaagaatagtgtttatgtatagttacactatatataaacatatataaatatatgttaaatatagttacactatatttttgcagtgttttacatattgttacatatataaaatgttttacatatgtagtgttttacatattggaacctttgtatttactattatctttgatcttcataacaattttagcttattagctctatttcatgcattgagaaactgactaagagagattctgaaaccaaaaaaaattctcacagtaagtacaattgtccttaaatatccatagaggatttgtgtcaagacccctcacagataccaaaatcaatggatgctcaaatccctatttaaaaaaaaaaaaaagttaacacctgtaattccagcactttgggaggctgaagtgggcagatccctagagctcaggagtttgagaccagccttgggcaaaaccctgactctacaaaaaatacaaaaattaaccaggcatagtggcatacacctgtagtcccagctactagggaggctgaggtgggaggtttggttgagcctgagattttgaggctgcagtgagctgtgatcatgccattgacctcagtctgggtgacggagcaagaccctgtctaaaaaaaaaaaaaaattcagtattttcatataacctatgtgcagcctcttgaattctttaattcatctctagattatttacaatacccaatataatgtaaatgctatatatatttgtatttgtatcttttttgctgtatttttaattgtcttttttttcataatttttttacctgcattttgttgaatccatggatacaaaacccatggatccagagggctgactgtactgaactgggagttgaacatgaatctttcccttcagggtttgcttyactatccattacaatacactacctttataagctattgatggattctgctcttctgctttctcagaaatttttgccctggttaaacagcatcattcccttctrcattagactcaatcccttcaaacaataattaggaattgataaacatctctaaaaaggataaaagaccaatgatccagtcttgtgcccattacagtaagcagtcgagggcatcagaatatgccaccccaaaatatgccactttggcataagaattattttgtgttgagttccggaagaattctctgcactccctttaactgcctaaaagtagagcataaatctctctttgtgaagggatcctcctccttccctgtgtcaggcatagaagagcattaatcactgagaaagaatttacactaagagatattgacatcaacaggccttactaaaataacacttatcttccctcataagcttcctggtcgattctccaggatttcttgacccttgaagcccagacaccttttcctttgttaaaatgatatatgtccccaagtcaaaccactttgagttttccttattttctgtgaattcccatgcatgtaaaacattaattaaactcttatgctttttcctcctgctaatctgtctcttgttagtttaattcacaagcccctagttacttaacctaagagagtagcagaaaagatcccccttccatcacaataatatgtataattttttcatttaaaaaatttaaaaaatctccatatattgttcagtgacctgcccctgacaacttcaaattcaaccaatcctaatgtgttaattcatgttaggtattttcttctcatacattgatatgaaactatttctgaaacaagtgaagcactaaaacataattggaaaggcaagcagtatgggagcactggataaattgaagtgcaaggcagagaataatgaaggaggatacctataaagaggcttcctatattatgattttctctgtatttgaccgtgctcataaatcaattgatagtacgttagaaacataaattagatcataatgtctgaaattaatgcactgacgacacttccatagaggttttcaaggaaaatattgatgtttttggagctgttttttgacatttgagttggcatcaggtacaaaacatctcctgccacccatcttttggtgccctactaagtgacaaaattctgataggggcagcacccagctgactccatgtagcagatatgatacttttgcttttaygatgccatctgcagagaaataaatcatcataaagttgactgagtgtgtcctatgttcatctgcttgaacaagttcgatgtaattgactgacaataataaaaggggattagagaaaaaaagtcctcagtattgtcaagtgagtgtcacccaacccctgacttctgaaagatggtcaggacacagatgggctgaaagaaagaagaagctatccaaggagagcaaacacagacaggacataaggagtgtgacagcatggcatctgtgtctgtgctgggagagtctgcatgcggtggaagaaatgggaggagaggtattttgcatagttaaaaggttagtctgattgaaatagatagttcatgttgttaactaataagggataatttaaaactgtacagttcactgaaattattgaatgctataatttgggtttatttttgtatcacatttgacatctcagcacagtagcacaggtagcacactgaggaagaattaattgagagcattctgcagaggtgaggctttcatgctttttcctcctctgcataccagaataggaacttaatggaaagtctgcatctggacagaccagggctctgtatatagcaaaatcttgaggccatttttgaagggattgtataaagagaaggagtatgtaaaaagtagtggaacccatatctgtaatgagacttcagtacattaaatgcttatacacaatgaactataacatctctgcagtgagtttttgttataaccttggttcctcccattgaagcactagtggaaaccattggccagagtttttctgatgatctgattgggtttgttgcctgtgccttgccctcttgcttcatgatccatgttgatcctcagatagttcttaataattctctagttaattcctttaatagcgtttgatgttttatttctgctgttcattccagcttgagtggcttgttagtgtggtctcgtcttctgagcaatagatttttgaaatgacagacagaggattttaaacttcctttagaggaacttatgaatataatcaatgttaagtgaaaagggccaataggccacttacacatgtggattgtctacctgtgaattgtctcaatcttagaaacttagataagcattgtgttataagcagataaatgctcagagcataatacttaataacttacttccaaaatttggtggatttctttgcaaatatttatgagtatacaatttcactccatgcctggacctaatattcaatatgagatccttgagagtccattttcaatgctgatcaaagcctttgtgttctcatacccaccatatgatgtagctataaagatggatagcagcagaaaaactagtgggctcctgtgcagtgagtcaaatgggaatgacaaacagcatgacaaatagaaraaacaatcagtcaatcaacattcatataccgtgcccctactagagtccctgctaggaatcaaagaaagaaatgacatagatcttggttaaaaagatcgatttggaggtccaacatttattcgaatattttcaaatattcatttccatattccaaaatttcaatatttattaaataattaaaatgttaagggcaaataatgatattaaagggagttaaatattaatgttatgtggaatcatcaggactaaaatgttttaaaaaatcttctttgttttcagtaagactttgtagcaggatttaagactggaagtttcagaaataaatatgaaagctattgtaagaattggggaaccaatgtaacaaaaaacgttgaaaaaagactgaatgtggtgtattatggaaatatggaaatagtgagatttcacttaagagaaaccttcatcaaaacacagcctaaagtaacagaagaccatctgttcagcaatagtaaatgtagagattcacttagcataagcraagaggcaacaattcaagagacaaaaaacaataggtgtataaaattgaaagagctggctaggtatggtggctcatgcctgcaatcccagcactttgggaggctgaggtgaaaatattgcttgagcccaggaatttgggaccagcctgggcaacatagggagactctgtctctacaaaaaaaaacacataaaaataaaccagacatggtggcacatgcctgtggtcccagctactcagtgggaggctgaggtgagaggattgctcaagtcctggaggctgaagctgagtgagccttgatggaaccagtgcattccaggcttgacaacatagtgtctccaaaaaatacataaataaaattaaaagagctttaaaatcctgtttcttactggtagtccattgacattttgcacacaataggtgttcaaatgatactacagaattattggctgggcagaataaaatatgtcactttaaaagtcaaattgagacttttttcctccaaatatgttttgactttggagatttagaaggatcaatttctatcagtggtagagggctatactctgaatatcgagtttaagatccatcatttgcttgagctacattataatagtttaatttttaaaacaacactgctgaaatagtttttggagctagataatagattgtaatacagactagaaggaattgcagtacatttcttcagggcagaaagcaggtgcagttatatctctgcatgtgcatccgatgcttatgtattttaaatgtaaattgtttcttttaagagaaaatattatattgaacattgatgcaaaggcattatgtgtttgtgttttattttcctgagatataaaactcattcttcacctataatgagacttcgatgaaatattccaaagtgtttgtaacaaatctggcatttaaggaagcagatttatataagctatagctgggatttttttctttatctatttccagtttctttataatattttatgcaggcttttgattttatctataggtgcatttaagtatgttttgaatagtgggggaaaattaaaacttgaaatttaacaaagaacttaaagtgagttaccataacaaagcattcttaaataatgaattttagaagtcggataaaattcttcctaaaaggattcattatataaagcaaatagctgaacaatgtcaggttgtaacatagtaatcaagagaaagagcttccaggcgaggtgcagctatcactttaagccccggggcaaccaggctgcttctcacatggttgccggggaagcagaggcttcagcttctgtggtcaagaagctgggtatgtcatggaccagtatttcagatatgcttgcattcaagaatgatttttccagctctcccccaagaaaaattgttcatcttgatggaacggggacagaagtcttgccgaaggacaaagagtgaaacaaatttaactttgagctgttgaagagccagttgtgagattcaaacataaaggatgaccagatcttgaactggctgtgaaaattttgctcttctatcatgtacttggcaaaagactttgagcagctcctcagtattacattragattgccttggttgaatagaattcaaacagtggtggaagagtatttggcttctctgggtagtcttgtaacaacagactcttccttagcccaagtctcagcataattgcttcccatttggcgtaccctccttgaatgatcattaagaagagccatgtaaatgtttcagattctgatgatggagatgattatcttcctgcagattttgacacacgtcatacaaccttacaaataacagcaagatatgtcccactggcactgtggtttcttttgcccatactggtggaaacatttccatttgttcaatcagagagaacactggaatgttacattcataacttactaaagattagtatatactttccaaccttgaggaatgaaattctgaagcttattattaaaaatctattcaagttggatgtgaatacattctggcatgatattgaagatgctgaggaaacagcagctcaaacttgtggtgggacagattccatggaatgattgttcaatatgaacgaagatgaagagactgtttctaaggctgactccaaatggctcggtcagatggtgcaccctgtagctgaatgcctggacaccctgctgtctttgcttttgcagtacttgaagtatgtctgctatgtaaaatacatggtaaggttgataacaacaaaataaaggatttataatatatcacaaactgataaacatatttgacaaacccctgcctcctgtcaygtacagttttttatgttttacctctgtggcttaaaattgcgactctcagaagcatttttggaacgtctctgggaaaaaaaaatgcaggatccaaataatcctgtcatcatcaggtgagctgctggaaattatattggaagctctttggcaaaagctaaattcattcctctcattacaactataaaatcatgcctaggtctttcggttaactggccacacaaataccttactaaccaggatctgagaatgaaggctttttgtgatattgctctccatcaaacattttactcagccttccaagctgtgttccacacctttgtttttagacacaagcaacttttaagcgtaaacctgaaagarggtttgagatgtcttcagtgcctacatttttaagggatagtgactaggcagctaaatcctctgaatatttgcctgccctcagtggttaacttatttgctgctgtcacgaataaatatcagctagtctgctacactatcattgagaggaacaacggccagaaatacagctggaggagactcggtgtgaacgtgcaccaacccattggacgccttcttcccctttgatccttgtgcgcttaagcagtcaaggaaagtcattgattctatttatcagatatgggaagacataagtgtcgaagagcttcaggagtttaagaaacctatgaaaaaggagatggaaaaagatggagatgatcttttgaaaggtgaagttcccccaaatgataccatgatcgggattataccgagccactttgatgcgatgcacatttccaaagtccttcaagtagtgtgggctccccacctgtgttacacctgccagaccagttccttctcatctcgaggatttgtgattgagatgcagcattcttccccatcactcatcatgttctttagcaactgtttatgctgtttgggcactgcattgaactagaatgagcacctgactcaggcatcatactttcaagttagacttgagcatctgaacagacttttttttttttttgcttttttgttccccttagagacaaaattagaagactgaatatcatgtgtaatattttatggtggggttgatgataaatgataaatactttgctcgtttgtttaagaagtacttttcttggccaggcgtggtggtggctcacgcctataatcccagcactttgggtggcccaggcaggcagatcacaatgtcaggagatcgagaccatcctggctaccacggtgaaaccccagctctactaaaaatgcaaaaacttagccaggcacggtggcacgcacctgtagtcccagctactcaggaggctgaggcaggagaatggcatgagcctgggaggcggagcttgcagtgagccgagatcatgccactgcactccagcctgggcgacagagcaagactccgtctcaaaaacaaaagaaaaaaaaaagaaagaaagaaaggaaagtacttttcttatgcattacagctttttgagataattattgtgtaatttctaatatagacagcagcctattttgacagactgcctttttaacacaggattttttttcagagccacattcacagaactttgctgatctactttcaatgaagaatcctwtaagataaatcctctatttaaagactttaactagaatgttttatttttgctgcattgtttacctcctgctctagttgtgtgttggaatttcagtagggtgcagaggaaatggaaactggggagacatccaaacctggtctgggacaaagagagttggagctggcactgaaggagatctctagggaccccagaaaccaataacagccagtagggaagagatagagagattagagaaacagaatcagacaaataatatactttcatggtgtaaaaatgaatttgaaaaaaaaagtggagatccaggtaaatgtaattcacgttgactgaaagtaggcttgggcttgcattaaaaaaattacatcatattttactcttcagctttcaagtgtcccgttagaactagaattgctctttggtagcagttagatagagttatttttgacctgcatcatttggttattttgagaatttcttttttcaaacaggaaaaaaaaaaattagggccgggcatggtgtggctcacgcctgtaatcccaacactttgggaggctgaggcaggtggattgcctgagctcagaaatttgagaccagcctggccaaaatagcaaaacattgtctctacaaaaagcacaaaaattagctgggcgtgttggtgcatgcctgtagtcccagctactctggaggctgaggaggaggatggattgagcccaggaggtagaagctgcaatgagctgtgtttgcaccactgcactccagcctgagtgacagagtaagaccccatctcttaaaaaaaaaaaaaaaatggaggttattcggtggaatggttttgctagcaataataggccaataataggccaaacttactayggcagtctttatccaatagctatgcctatcatggattcagcttggtgaaatccttctctacaagcctctttttctattttcacaactaaacactgggagagaggggaagtctaagatgaaaccttgctttataacaaatttgcccaagcactgcccgagtcattgtgaagttcaagtatatttttgctttgttttttaaatgtgtacttttttgtttacttgtgaaaataaccatcttcaagcatatttatttttctgccccttctatttatttaaagacaggcaatattttcttgaccacaaatattttgtaatgaatcacaccctctatcctaaggctttgtatgctattgcataattacactggtggcaatatagagtttgaatttcagtctataaatatgttttttggaaaacagaaattgtcattgcttaaaaaaatttggatattggtgatttgattttggtgacttggtggaaagtcatttgagaacctcatggttcttttttaattgccgacaaaaagtggctttttgtaagttggataaaatgagtaaatgaaattgtatctagagaagttaagagtaagtgtaatctttgtgggttggaaagcagttttaacacagaaggacctatttacaaataagtctgtttagctttgaaagagtttgagaaaaaaaaatccattgtgaaaataaagcaatggtatgattaatccagaaccttcattcttatgccaataaaaggaggtatcccaattttaaaaagatttctcactttaaaaaaaaaagagagacagagacagagagagagaagggagagagaaaaggactgtaatcaagactctatacccagccctgaatcattcatctgtcagagcaaataaagctatctaatgatacgcaaataatcaaaaccatattattctacaccggttagaggagaaatggatcgaattaaaaccaaacaataactagaacagattgctcaagtatcactatggaggagagagatcccccaaccaagaaaagggtattttgtgagctccattctgggggaaaaagattggggatgctggaaatcaaataataaatacagtaagtatgttatttggtcagcctacatgctttattgaagtgcaactaaagtcctagtctttactagttctctatccaattgtgctcagcctaaagttgaatctatgtacgttttagtgtctgcatttttattatcaagattttaattgatgtttcttttatactcatattttattgtttcaatcttcctgttttttacttcctaaataatctaaaacacacttattcctctgaccataatttgatgtggaagaaatttgtcatctgagtgcttaatcattgtgtatgtctttctgagtgttatgctacttaatataatttgaaattttactttgtagacttaagaaataatttcatgtgattattaatattctctctctcctcccactctaattgccttactcaaatcatgcccacccactcaattctgtttttcaaaagtaacagtcatagttccagtagcccaacttgtaagaggcacttctgcctcctacgggagccaaacttgtatctttttttctttttacccagatccagagcactttaggcccataacttcagccctacttagggttttgttgttgtttttctacttcttatccacagaagtatgtcttctttgaatcccagctatgattattttgcttttcttttattatgttgtctattattgcagttttgaggactatgttgtgtggaagtcttcccacttcctctctttttccctcaatctctctctctccctctcgcaaacacatacacacatatatcttattttctttcctttgatccattcctaatcgaattccctcttagaataagcattgattatttctttcataatctgcattcttcccaaaccactgtccatgccattatttatacccatggggatttttgaataatatatagtatatrcttgtatgttttatgatcaaaattgcattatatactacgtatcatgaaaatgtcatgattgtggtttttactgaatattttacttttgatatctctgtcgatatagatagatattattctttctactgttctatagtattccatcatatgcatatcacataktgtgtctcttcattttcttatgtttaacatttctaatctttgttatggaaaacatgcttatatggacaatagcccacatttctctttgtaagtgaagaagtgtttctgcgggatccagtacagatagggctgatttccagctggacaggaagagctctatctgtatctctggaggtgcctagaagactggtttttgaacctttgccaaggaaggggcaatggaattcatgatattctgttcagggtttgaaactttcctagatacccaaagttatcttcctttcactctgtcactcaggctggtgtgcagtggtaggatctcagctcactgcaacctcgacctctcaggctcaagcaatccgtccacctcagtctctgcactagctgagactatgggcatgcaccacaacgtccagctaattttttttattttttgtagagatggcattttgcagtgttgcccaggctggtcttgaactcctggactcaagcaatctgcctgccttggcctctcaaagtgttggcattacaggaatgcaccaccacgccaagcccaaagttagcttctttattgttgactttgtcttaacccattggataagcctgattttactatttaaggaggcactgagagcttttgaggggagctcttccaaagacaaaattcctagcacagatcctggaaatttgaatcagagactcagctcagtcctagagctcaaagataagacccccaagagctcatgctgtaggtatctcttggatttccaaagcttgcctgcattctttagatattaggttggtgcaaaaagccttaaaagcctcaaggaggtctggtgagacactttaaataactgatgtgggaaaaaaacaatacagatatatacccaggagtaaaattgctgggacattgggtatgttcctatttagtgtcaataaactgaataaagctatttataatggctgtactggaacagagtgcaaagtggacttcctacttttccacattctttccagctgtaaatattatctaaatttttaattgttaacaacatgattcatatattaaaatatttcagcatgcctttaacatgcacttctctgatttctaaagtgcccatcyctttaaaaatgcattagccattcaggttttccctttgggaattgcttattttaattccttggtcatttttctattgtgtcttctttcttcccgaggagcttcttaaatattctagatataaattttttcctaatctgtcactttcctattaactgggcctattatatctctacttcagttttctgatttgtaaagtagaaataatcatacctataactctttcttttttttgcctctaaggattaaatgagataatgaatgtgaaacactaatacaacatctgacacatagtgagggttcaataccaccagggatttattaagcctctttcttttttatatatactttaaggttaagggtacatgtgcacaatgtgcaggttagttacatatgtatacatgtgccatgttggtgtgctgcacccattaactcgtcatttaacattaggtatatctccaaatgctatccctcccccctccccccaccccacaacaggccccagtgtgtgatgttccccttcctgtgtccatgtgttctcattgttcaattcccacctatgagtgagaacatgcggtgtttggttttttgtccttgcaatagtttgctgagaatgagggtttccggcttcatctatggccctacaaaggacatgaactcatcattttttatgactgcatagtattccatggtgtatatgtgccacattttcttaatccagtctatcattgttggacatttggcttggttccaagtctttgctattgtgaatagtgccgcaataaacatacatctccatgtgtctttatagcagcatgatttataattctttgggcatatacccagtaatgggatggctgggtcaaatggtatttctagttctagatccctgaggaatcgccatactgacttccacaatggttgaactactttacagtcccactaacagtgtaaaagtcttcctatttctccacatcctctccagcacctgttgtttcctgactttttaatgattgccattctaactggtgtgagatggtatctcattgtggttttgatttgcatttctctgatggccagtgatgatgagcattttttcatgtgtcttttggctgcataaatgtcttcttttgagaagtgtctcttttcaaattgaattgatattttgttgtacctagatatatgtataaatttaggaaatttaagtttaatctagatttaaactaagtggttttccagtagcatataaaatcttaggctagacaccttaagcttagcatgtagactacagtgatagacaaagatgtgctgggaaatcaggagccttactctgttcttgaacccacattagccgggcactcctgcctgtgtrggaaagagaccctgtccttaaatctgacctccctttctgcatcaggtacctgacctgccgatgacaaagggattcacaaaagtacccattaaatctatatgttyatattttcaaaactgtgacactttcrtcatcattactctactctagcccttcctgcagggtttattacccaggttgtcaaaatattttgaaaaagacatcgtgaaacacaacgtctatgttgtatctgatttcctttcctgaagaaaaacaagcctagaagggaaaggaaaaaaaatgtactgctaatatcatgatagggagtaaaataattcataaattgatgagtcaagatgtgttttctaaaatttgcattatagatattagcaaacagagatagatatgaaagacagtggagcaattggaatgtttttaaatgtgcatggcatattttttagtagaaagttttcctttcagttgctaaacaaattctctaaacattaaaaatatttcagaagttatcaggaaataatcattaaagtaaattgctagttggtaaattcccactccaatgtccattcttggctctattaattcatactctaatcttagttggagtctttactagcaaggtgtcctggggagcattttatattcacttactaaatcagattagtctaagatgcaccttttcccagaactgtgtacactcagccgaggttggtagacaacatttcattccttaaagatcatgccaggagtattctgccgaggaaatgaaagaccacatctagaaacagaggaaaagagtgacgtgcgagctttattcgcaatgtctgcagtaagtaaacgagagggagtaggttcatgtgtgtatactctgctctggaaccctctctgacttccccaggcagaacaattattacatcttgccattccatgaggatgtaatttcagaatattttgaagggctcaattctaatcatgttctctggagatctaatagagtaaatataaatataaaataattacttttcttgaaagatttcagatcagctatggacttttattgcattaatcaataaattcaattaatttatcaagtagattactagatattacagatttagaaattatacatatgctagggttttccaaactgagctaaccctcttaattcaatgggcactgtaagtgtactcataattgttttgtaaaccatatgtcaatagactctattctcacaaacataaaggaaagtgtctcttttattgctttgtactgtaattgtactgtagtcaagacagagagcacaagaagaaagagtaatagacacaatagggatatctcatacaacatgagttggactcattaaataaacaaagactttgggtcaacagttaagctaagagacagagttgcaaagaataagcttttcctatgatctctagctgaaaatgtaaacacagtcttttttgtggacatgcagtggaaaggattagttctaactctctgccggtatgtgtgtgtatatgtttctcctgccgtccctgggattgctcatgatagaagcaacttcatttttgagagagtaggctgtggggtgtgacaatgaggaaagaagtactggtaaagaatttcctctttgtaatgcttctacagctagagtttaataataccagggggcattcttattaatgtgatggctttttattttttttgagacagaataatcactctgtcacccagcctggagtgcagtggtacaatctttgctcactgcaaccccgctgcccaggttcaagtgattcttgtgcctcagcctcctgagtagctaggattacaggcacacactaccacactcggctaatttttgtatttttagtagagacaaggtttcaccatgttggccaggctggtctcgaactcctggcctcaagtgatctgcccaccttggcctcccaaagtgctgggattactggcatgagccactgcacccggcctaatgtgatggtttttttaatgtgatggcttctttaaaaaaaaaagggtttgttttattctggtggattttttaaaattttaattaaaattgtttacctctgccatgttttacttgtaaaattttgttagtgaaaattagactaaaataaattttctgaccaatgactaaaaatcatcatatttcaacatgcttttctatttgaaaccagaagtaagtccttgcatattaaaggattttaagcttaacctgttaaaaatattgtttgtgtggaataactttctcttttgtctacttaatgtatgcctactcaagctaacagcccaagttatactcatgctagatctagacagtaaactgatgctcaggcatatggctcaacattgattttttttgtttttattgtttttaaattttctagtccattgtcataatgcttttatttttggtgttgattttaatttgtgatattttaatataatttattttatttatttatttatttatttatttatttatttatttatttatttttatttttttattttttgagtcggaatcttgctccatcacccaggctggagtgcaatggctcaatctcagctcactgccacctccacctccagggttcaagcaattctcctgcctcagcctcctgagtagttgggattacaggcacctgccaccacgcctggctaatttttgtatttttagtagagatagggtttcaccatattgaccaggctggtctcttggccaggctggtcttgaacttctgaccttgtgatccgcccgcctcagcttcccaaagtgctgggattacagcgtgagccaccgcacctggcaatatatttaatttcttaacataactatttattagtagattttggtgaaaagagacaacacagtggcaatataatctaattcattatataatttaataacctgaattcaggacacatttgattacctcctatgtaaaaggcagtaaagaaagataaaacttcatgctcaggtaacaaatattctagtaaaaaaaggtaattatcttggtccgtttgcgttgctataacaaaataccttagactggctcattgataaaaaataaaaatttatttctcacagttctggagtctgggaaatccaagatcaaggtgctggcagatttggtgtctggtgagggctgctttctgcttccaagatggtgccttattgttgcatcctctggagaaggaggtaaagccgtgtcctcacatggtagaaggagaatagaaaagaaaaaggctcatttttcagagataatgcagtctaggtgtcctcatatggcaaaaggcatgggagcagggaggcagctctatgatgcattttttaaaagggcatttatcttatccatgaaggcagaattctcatagcctaatgacctgcgaagcaccccacctcctaataccacctcctagggggttaggttccatcatatgaattttggagcaatacatacaaacaaatcacagcagcaatcatgtgtacaggtaaagtgagaacttagcctatactaagggttattaagagcagtacaaaaactgctacaagtacaaaaataaagggatatgtttgtccttagtaacccaaggaaaagagtggagtgagattgaaagagaagacaaaggagaatgagaatagaaattaactgagatttgcactgtaaaagaagtgataggaacgaaagctttcaatgtagaggctgtcagcagagaaggcagtttttgatttgtcaattaggaagtcattagacctttgtcagagaggaggttcagtaacacagtggaagtgaaagtaagatttaaggggaacttgcagttaaaggggcagactagccacttttacactgctcttctctttaaagccaagagaatatgaaaaaaaaaaaagctttttagaaaactgagaagaaaattctgtctttaataaaagttaatagctataatcttaaaccacaaactattatattaagaatagctcttgaataaaatgaagtttcagacctacgaagtccaagtgtggggccagacacagtggcttatgcctgtaatcccagcacttcgggaggccaaggcaggtggaatgtttgagcctaggagtttgagactagcctgggcaacatagggagactcccatctctataaaataaaaatacaaraatcagacagatgtagtggcatgcgcctgtagtctcagcttctcaggaggctgaggtgggagattgcttgagcctgggaggtccaggctgcagtgagccactgagccatgattgcaccactgcactctagcctgggcagcaaaacctgaccctgtcacaaataaataaatataaaaaaagaagctaggcatagagagtgcactcttatcttttgtgagccagggagttctccctggacaggaggtatggtcccgtggaatacagtgaagaatatcttggctaggtgtggtggctcatgcctgtaatcccaacattttgggaggctgaggtgggagaattgcttgatctcaggagtttgagaccagcctgggcaaattagggagtctaccaaaaaaaattttaaattagctaggtgcagtggcacatgcctgtagggctgaggagggaggatcacttgagcctggaacttggaggtcgaggctacggtgcactgtgatggtgctactgccttccagcctgagcagccagagtgagaccctgtctcaaaaaattaaaaaaaaaaaaaaatcttacccagagtagtaattttggaaaattggatagaccagggagcaatccctaaactccattccactctgagtattggaaagagacataagactgaaggagacagtgtatagaaagtacatagccattactataaagcattgcagcaggtttgatagggaagtaaagatcagcagccattggcttcaaacatgatgatcaagtttagctaagtcatcttgccacatgaaacctacgttacctggtgctaaacttgagtcgtgttgatttcctgctttaataacaaagagaattgggccataccaggcagataaatccacacatacctccaggatacctcatacctccagtcatacttctgatttatagaacatgttacctccttcagaagtaattatcttatttcctctctatcttattgtatttttaaaaatttcttgcagagatggggcctcactttgttgcccaggctcatcttgagctcctggcctcaagcagtgttcctgcctcagcatcccaaagcattgagattacaggcatgagccaccacacccagccggaaacattttaaaaagagacaacaaactgactggagtacaaagtaatatctcaaagttaggattgaaactcaagttgatttcctaaaaagggcaatcaagaaagaaaatattcctgccttctgatcagtggtgaatgggaaaaaagaaagaaagaaagagacacaaaaaagaatattgcaaagaaaagaagtaactgcacttaaggaaaaacagagaggcaagtgagagagtttggggcagttcaattttaagtttgctgaactatagcatccatggggaagagacactcaaaatgagactctagaactaggcacaggcccggtgtgtcatattaaaacttcacccttttcagatatcaataagaaaggcttttaagcctgggcaacatagtgagacccccatctctacaatgaaaaataatcataatatagaaaaaaatgtattttataaaaggcctttacataatatcttaagacatgatttcatttgcattttagaaaaattgatctatggatgacatagagttttgattataaggtgaaatatagagacagggaatgaagttaagaaactgtccaaaggaagttgtaacatgatgatgagacaggattcttttgctgccgctttgccagctgaaaacctctgtggctggtactctgccccagctttgctcagtccctctgggcttgctccgcccgcttggcctggcaggctgttkttggctcactcccagattctgtgatcaccacagctctgcgcacagcccatagtgggaccgggtgtgcccaaagtggtttccacagctgggtgtgggccttcagacaaggagggacaaggtggtgccagagaactcagaaaaacaagcaaccacggagcaccaagtgggggtcacagcttctgctaggggagtcccgaggtctgagacaccggggaatgccacaactctctttctccttcctgctgcttgcagctcggcgagtgggaacgtattatagcttgttcattcctgccgcctgtggcttagtgaacagtggtgtgttacagctctggctcagagagtcccaaggtctgggcccccagaagggtcacagctcctgtcatcctcacccccttcagcttggtgagctggccaggagtatgttacaaacttttttgctcccattattcttcaggttctgggttcctgtcctgcaaccaagaagaatgaggtatgcagacagcgtagagtaagcaaggcagagaatcattttattgaacgacagaaaagctctcaacagcaagaggggacccaaagtgggtagcccgctgtgtaccaagggccagaaagcaggttgctgtctgtgtggctgagtctggggtttttataggtttgcaattaggaggcgcaggttgtaggtagccttggaaaaggcaacatttgattggttaaaaagcattattcatcatgcctgtaatcccagcactttgaggggccaaggcaggtggatcacctgaggtcaggagttcaagaccagcctgaccaacatggtgagaccgcgtcttggctaaaaatacaaaattagcggagtgtggtggcatgcctgtaatcccagctattcgggaggctgaggcaggagaatcacttgaacctgggaggtgggggatgcagtgagccaaaatcgtgccattgaactccagcctggacaacagagtgagacaccatctcaaaaaaaaaaaaaaaaaaaaaagcattattcagaaaggaccaactagggaaacagtgggcgaacaggaatagaagttcttactctggttgtagactctatctggaatcagcagktcggttttcaggctttaaattgtctttgatttgaaggstgggtttcaccaggaacccaaccctgtcggcctaggaatttgtctgtctcctgccactatcaatgaccagttagactgagacatgcagcaggagggggaatgctatagaaggaaggagtagacagtcattggtcaaagtgaagactccatgttttctgttaaaaacccaatagaatttatgattctgtgctttttgtgaaaagtcatggataagaggaaattagaaagcaatttcttctgcctatgtcttctggctgattatttttttgttctatattcgtgtcttttcatcaattaaaaatctggagtatcctgcttagctactcattggtgtcagtaaaacattaacctactattgcattcagcctatgtcagtgcagtgagtccaaagatccatttttcaagcacaataaagatataggggtcctgtatgagacgaattgcttttgttttgttttgttgttaatagagatggggtctcgctctgttgtacagggtgaaacacagtggcagaatcgatataaatgtaaagtggtatgtagatatatatttaagtatgtgccttaaaaaaaactaaataaaatgacacaaaagatattgaaaaagagaaaatcaaagaaaatatacaagcaaaatatcaacgaaaacaggttttcctatattaagataaaaattaaattcataggaaaaagtataacatgaacaaatgggaatattttattgagtaaaatgaaaataaataataataattttagctacttgggaggctgaggcaggagaatggcatgaacccgggaggcggagcttgcagtgagccgagatcccgccactgcactccagcctgggcgacagagcgagactctgtctcaaaaaaaaaaaaaaaaaaaaaaaaaaaaaaaaaaaaaaaaaaaaaaatattaacttgtatattcactatatattccagtattttttcccagtttgtcatttgtcttttgtctttatgcaggaaggttaggaatgaggcaggatcatcaaacctggaaactagggatctctgaagccactggagagcctgaagcatccatgaggccaagtagcctagagatgcccatgaagggaatgcagggagagatccttcagctttcacacaatgagaagcctgcagttacagtgaagaaacagtttaacttagcataacatttataagttggaagaaaacatttctaacaaacagaactgatattactcaggatataaaatgttctactacaaataatgcgacaggaatatgaaccaaagttatgattacctttgtcttagcattcagctagaggttttgaaatgctttgttgcatcacagctgagaactactaagagtcaatgattctgctccttttggtgtgttgcggcaaagaggaggttgcaaatttctgctcctgggaagtttgatagaaaactgcaaggccacctttccatggtacagactctttgtccttggggctatccatattgaattgtttttcatataccatataaagaccattttttaaattaaaagcaataacaatttcttaaaatgaacgttaaaataaccaggaaataatttgaattatgaaattaaaccaatgagataaagtgaaagaacagaatgccagaaactaagaagttgagcaaaaataaagaataaatagcataatataagaaataataaagctaaaactgtgcaaaagaaagcaatttaaaataattaatactgaaatcagtaaaatagaaataagcataaaagtgagttatgaaataaactagggaaagaaataaaaggaataaaaaagagttaaaaaatgaatcaatattaaaataataataaaaagaaaatataagaaacaaattggacaaaagtgaaagagacaagcaacttcattggaaaaaaaaatgttaaaaaaataagttgaggggaccacacagtgtctcatacctgtaatcctggcactttgggtggccgaggtgggcagatcgcttgagttcaggagtttgagattagcctgggcaacgtggtgaaaacctgtctctacaaaaaatgcaaaaattagccggatgtggtagtgcgcaccagtggttccagctagttggggaggttcagatgggaggatcactcgagcccaggaggtggaggttgcaatgagccatgattacaccactgcattctagcctgggcagcagaatgagtccctgtctcaaaaagaaaaagaaagaaaaaaaataagttgagggtaaggggatacagggatctcactgtactttctgcccaattttgctatgaacctaaaattgcacaatggaatagaataaaatctatataaaagaataaacattttttaaattaaaaataagctgaaaaggaaaatacagttcaacaccatgtaaaacaacaaaatatggtaaaacaatacagcagggaaaagctgtaatttattttagactgaattagtgtatcctgaataaaacgaatgattactgttatgtaattatgagtgatattgctcaaaactattgcacatatacttggttgtttactttgtatgtttgcaggattatttaaactttgtataatctttttacaaaacaatttaagtatagaatctttccactttgggaggccaaggcgggctgatcacgaggtcaggagatcgagaccatcctggctaacacagtgaaaccctgtctctactaaaaatacaaaaacaaaattagacaggcatggtggtgggcgcctgtagtcccagctgctcaggaggctgaggggagagaatggcgtgaacccgggaggcggagcttgcagtgagccgagattacgccactgcactgcagcctgggtgacagagcgagactcagtctcaaaaacaaacaaacaaacaaaaaaacagactctttcaaggtgaaaataaaacctgtttatctgaaataaataataataattagctctgaggaaaatagatgtgatacaattccttatcaactttttttttaattgaaacagtattttgaagcttacactcctattcttaatcaagctttggaactgaaattagcataatttcagaaaatgaacaggaaagctcatctttttgtatgatctggaatagtttgaataacatgaggttctcctaatctttaatgctgtgctagaattcatatgcaaaacttttcaaacgtaatgttgccttctatttttttttctgtacttcctggcagtggggatgtttccttttatacaataactctttaaatgcatttttaatctcctctaaaggaattgttttcttcaagtgtttctcttatttggtcagttttgaaaatttgtattttgctaactaattatatttttcctctaaattacaaaaatatttctatagaggacactattttcttacatgaagacaagttaaaatttcaaatgcatttgtccttttctgtttcttactagctcttattcttatctaatactctgcatcttccttgtctagattcagagcccctcagaagcacttttctttggcttttggggacatattgcaccattcttcagatcctagtctagtgaactcttttcccctgcctgcgatgtggggttaagacaatttaggaatttgctatattttggtgtctgtcatactgtaagctatgagaagtttcaaacgactggcaaaatggtggacccatactggacacttccaaaatgggaaattttacaccgtttattagtgacactagaaaatactttgccagacaaacataggaaaaaggacaaatcccagaagaggatcttgaagtgacatctccaaacatcagctctacactatccctgttgatagtcatttttaatattaagaaaaaaaattttctgttgtaagttgttatggtaaaagagggcatgtacatcgtaccttgtactatagaaagaaaccctggtatatgaaagctttgtctttaaatggagattttgtaatgcctgttcccgttttccagagtcatcatgacatcaatgatgttgttatgtggtcaatgatgtcaatatgactcaagtcactttgggtttttcatgttttacaggaaactcagaaattcctcatgtaaacaatcagacaattgagcaaattgacctgcaaacacatataacagaaaactactaaagttcttctgctaccgcacatgatttagattgccttctatacctttgtgagtttaacagtgagggaaaagttctgatctaggaaaaagggaatgggttataggaattttagattctaaataaattttaatcaccaactggcaaaatgtcatttgcttataacgagcccttgcattttcctctgaaaaactgaaaatacaacatatagagagggtaggaaagtccccgcccattactgagaaatttttctaataaccagactatgtatctcacaggaaggaaaaagtagattgtctaaacatagcctagtgatttattagcatattaatttgctttgccttccctgttgtaggagggagagggagaagaaaggagagtatgggtgaggaaatgagagtgcagtggagggaagagagaaaaagggaaaaagaaaaggagagagagagagagaggaagagaaggcaagaggagggcattagagaaagaggagagaaggcaagaagagggaaagaggagggggcagcaggaaaggaaggagaggggaaggaaggacagataaggggagagggaagaagagaggagagataattttgtgtgtgctctgttttttatattttcccctacccatatagagaagatgctgtaggttccttggcagaaattgcttaaggcaaatctcatgactggcatttgagaaagtttttgttatgttatattggttatccccaaggggaagtttggaaagagtgattgggtgtgcaaggccccagggatatggtgaggggaaaggagaggcaggagggcagagagaaggaagctaatctgcccctcccrtctgggaacttcccaacaccctgtgtaaagaagaaaggagagttccaataatgactcagagtaaattttcctcctaagaagtcacatgtgagctctgcgtttttatttaattaagaaaaatagcgtattgtgaaattttctgtttacccaagtttgagactgcagttttttttattagttctttcctaacttgtctctgtctttaatctcattactcatttcacatactgagcacccagcattagagtgttatgatcagcctggtagtgcagccttggattcttacataaagagtttgctgatctgaatttaatttagttaatgatccagcaagcacccattttagtctactaaatgctagatactggcctaactatggcgaaaatgccctgaagaataagaataaagttcatggttcaagattaccttttgagaggacaaaactttcccatatttccaataatcaatttttagaaaataaactagatcttaattaaaaaaaaacaaattaaccaattcagtagatatttatttagctccatacataggtagagctctgaggaggataaaattagtcttttcctctcggaaacatatcattttataagcaggatgccatacctggaaattaatagacaactcggaattgtacaacagcttattctggcaacactttttttcttcctgtttccaaaaggaaggaatggtatctcacagtgttctctgtttaaccttgactgctggccctgtagcgggtcttgctttcacccctccccgcatgactcgttctctcataattcccttctgtatttagcggcctatgttattatacaagttttgctccccattacatccctggcatttcactttgtgcttggtacagagaatatgcttaatacttttcttgaatgaatgaaagtgtcaactgaagaatgacaggttcatacatttggaaaggagagcttcatttcacataaaggattgcagcctgcagggtgatcattctgacctctgaaaagtatagcctctaatcagaagctggaaacagacattttgagggaggagcaaaggaaacagaaatttatgttgagcagggtagctgaatatatatattcaataagctataggggaagccatgaatatttgtgaaaggagaaatgtgcacatgcacaatggagtttcatgcttctccatgggatccgtgttcaaaaaatgacagcattaatacaatctgagggggcagttttcagcccaatgtgaagcagaggacatgaaaacctttactgcacattctccatagactagccagaaacattccatgatcagtattttctttttgttccaaaccacaaaagagagggataacaccaggtgatggttgatgtcattggtgtaatcttttgaaatgactggtttctttttagccatagggcagaaagcctaatcatagttagtgatggagcgggtatgtgttccacttcctatcctgtcatggccaaaaacttagttttcaagtttactctgggatccccttggccaagagcgtgtccgttcagttaatctaggggcttgggattttatttttattcctcaaatgtaacaaatttaaagaaagaaagaaatttataaaacataagaaatagaagtatagcttagacctccaagcaagttctttaaaggtgacaagttaaacagtagtttttaagataatattttgatgaaatttttaatcatattattacaagattttagaagaagcaagatcttrtgaaaacaaaaccttaatgtccatatctagctctctaaatctatagtcagtctttaaaagagtgacacaaaaatgacacagatccgccctctggttcgctccccatatattagagcctggtaatcttccaaagtttttacagcatgaggcatacacagaatagatgcaaaaaaagtacacyttctgaaatttcctgaatggattcaaacttttactattctaagttaatcaattggtagtctacttactttataggattattgtaaggataggatcaatgaagtgaaatatattttattttcactggtcaattactcgtattaaagcaatttcatgcactttatctccctctcttggaaactggagagtagtactttttgtctggttacttaagattaaaaaaaagacaatatgtcacttttgacttgagtgtcatggtatctatggccttcaacctgcatggttttatcgtttcagtaatcttgggaggaaggtattattaagttcatttgataaataggagactgagcctccacaagggttaagtgaattgctcagggttatacaatgaacacttgatagaaatgattaaatgacactttacttgatttgttgtgggttactaaataaagcataggtgtgcataagtcattcaattattcaagcacattcttcatccctagtcctaatatcgaaagtctttgctcttagtttttataactacaaggatattcatcaaaagacccaagctcaggaataagcctaaagaggtagtcagactagaacaaaagacaattcacagacttaaatgaataatttgcattaatgaagtttgccaggctagtttccacttgaatcttcagatctttcttccttcattgtcttgttaactgtccagatttattacctaggagtttttgaaaactcacatattaggcaatagagtgtattctggaattgagagcctattttaaacttttgactaaaaagtttacccattaaatgtcatagwttcaaccatcagactgaaaatcctcagtgtatttgaaggarggtattgtctcaaaaatccagagctcaaagtgaagaagaaaggcaaaatttggaatttagctctargacmaactcatcagttcaggggtcagagatttatatagttaaaggacaagtgtgtgtttacctgagtttaaagagcaaagttgcctctggaaagaagccctcactggaggctctggcatttgaaatggtgggcaggagcacatgttgcttaaatttctgacagtggctggagattaccgattggttaggggagaggaagtaaagtaaaatatttataaattctccactgggtggagtctgagcagttctttgaatttctcaccctaagatctggcctgtacattttcaaggaattcttgagaggttcttggagagattctgggagccaaacactccattgggatcctagctggtaagcttgaggcgctgataaaaactctctaccctaatgtttactccatgttttttccaaatgaaacttctgtcagctagaatccttgtcatagtgttttagaggtttttttctgctactctcttctttttttatatatattctttttgtaaataaaaatggtatgaccttcctaaaggccccacctttagaaatgggttaaatgaaaagatctttactaatgtaatagaaaagaactgatgaacatagtgcactgaatatggttacatttgacaaaccaaagttagtcctgttcttatttgagtttaagcggtaagattaggtcaaactccagacgagggaaagatattcttaaacagattttaagtcctctgttttctggtaactttaattgtcttatgctgctagtagtcatattaaatatttatttagagaagtgaaaatgcctactcttgaacagagtttcttcccctttcattttatgaaacctaagaaaagaaagttgatacactttttaaaaatatactagattttcttttttcctttctgcttttattttgaggccagtggggtgttatttagtagtaacactgaagcaaatgtattgattttcttaacgtgttcagcaagtaattcatatcctagatatgaaatatacactcgtagcagagtaatgttacccatttctcaatgatatgcttaaagaatcttgctcaatatgcatattgtttttccttttttctttactaatgaaaaactacacgctttctcaacatatttttaagtcaggttctaaactttgaactcctatgtacaatttgcttatttcaggcatgaatgtgaaactgtgtaaagattaactaccagacactcagtcatttatttaactatttagccctaaatcagtgggtgactaggagattctgaattctgtgatttcgttaaaatcaatcagtttttaattattatacaagctttttactttaaagttgtagctgtctaaataaaattgtgaaagcacaatttccaaacctaaatcgaaggcacattgatgctgtccatcagaaggtattgataatttaaaaaaatattacaaactatcttttatctttttataaaggacctaatgtcatttgagcttaaccataatcctttgaagaaagtaaaakttaactttaaataacattgacatacagagcagttaggtgatttgtctgagaccatatggtatgtatgtcccccgtcttgataaaattaacactaaatatgtaacatttgaaaatttgtaaaatatgtaaaagttgaagtttttaaaagtttggatttaagttcttcctttcagaatatgagcatgtcactttatttgcaaactaaacatggcataacattatggcttgtgaacactaattgtcttagctgctggggtgaatgcagaattaagcagcaattagtatgagtgaataaattgcatccttagagtgagtgcactatgctattctgggaactaaagactatatttgagaccatgcgaagttgtgcaagtggtggagtagggcagggtgcagtcatttggaagactatgcccatcaggtatctcaaggtaccccagatgtgacaggcccaggagcggaaccagccactttaacttttgcctggctgaaactggactgggaaggatggattaaaaaggtaaatcaattcatacgtagcttgtggtcctttgcagcttaagtgtaggactgaaaaaagaagccaaagaaaaagggaatgagctgaagaaatacacacacgtacacacacacatcaggaagcaacaggcaaggaaaaataaagtgagaggttcaaggcttcgaggaggaattgagctctgtgcattccattcatgggctttgccaaagaccagcacaatggactcagcatctcaggcatggttaagtaccctactgtgcactctgctatccttttagtccactggtttctactctgtctgtgccaggttttcatctcaatatagaggaaaaggattctgatgcctcaggattattacaagcattaaataagatacagatagaatgacgctaatgagtatcatttttaaaataaggaaagttgaattttattcagaatctgttggtaacaaactaatctctttatttaagtaaccccacttagagtttaaagtcacctccaatcaactcaaagggctgacctcccaaagaaagtctcaaatataaggcaagctctcttgattctgaatttcattagaaatgtttgtctaagtctttctcatatggtcagaatgagagagggtgcccttctagtaatatgtcattatgtcaaataattcatcaaccaattttgtttattctctcgaactgccactttggcggcaggggtactctgtctaaatgagatgtctataaagataaattaaacatgattcaggcccccaggtagagttcagttcagtagggtagaacagcaactcagtccagctaccatcagtaatatgtttgtagtaagactaatctgakagtaaggcagaaaaacatctcatggaattttaggaatagccaagaagatggrtcccctggagacttgcacatagcatgttgcatgaaggattcagtgacttgcaagatgggcttgtcttgtcaccttttcaggagacatagctgttcaatcccttgccattgtgtaactaagtgactcttacttgctgctggaatcacttcatgcttttcatgctttaacaatcagtggttctgttttactttgaaaaatgagtcattctatgacagtattcctcctagaccctagcatttcatagcttctatctatgattattttaaattctagctcctgtatctaactgaatgaataagcacatcccacagctcagattcctgaaagaatttgattatgtactcagctaaacatcatcactgtttggttagagcttttatagcaaataattcacagatctttgatgaaactacattgtctttagtgggtaagtgtccaacagaggtctaataaactatgaccaggcaattgataatgccaagcggtagagacacagtgatctctcttcaaaatgcagtttccttcatcagaaagctatgtgtggggagccatttagaatcaagtttcaggcatagcaaatgtttttgatctttcctatccatacatatgtccaaataaatatagtacctggcagaatgtattattatcgtaagtaaagtacataagtgtgctcttaaktgttattggtgttcagaggaagacrggctacttttgcctgagacatcctaacaggcctcttgaaaaaagcattggagcattaggtctttgaargttggctagaatccaaacaagttgaaggggagcaaaacattttaggcaaaggaaatggcatgagaaaaatcacagaaatagaaaatttcatgtggaggacaaataatacttatggtcagatattgaaagcaccatccatcaatgttgaaatcctacacttttgtacagaaccatggattgaagcagttaggagtcacaactgatatcaaagtaaaaaacatgcaatggtgaaccttggtatctttgtctaggaatataaagaatggcttatcagtggagaccatcgacagttgagaaaagaagaagcccaaaaagtacaagaatgaaaatcgagagtgtaagaagaatgtctgttttactggcattatctaacactcagatatgcaactctttattgccaaacactgtgtgtgttagttaaggtaaaaggtgaagggaggcagaagaatggagattgaattgaattctagagctttagttctgtgtgagtttgggcccccagaagttctagacattaagtacagtctgaattgagaaatattaaacatatcttgtgatccaatattcccctaagttatacactcaaatatccaatgaccagcttgacatttctacctgcatgttcaatacttatttgaaacttaatatatcctaaatataatttttttttamacagtcatgctctgttgcccaggatggagtgcagtggcacaattagctcactgcaacctcagactgctggtctcctaccccatcctcctcggtagctaggaccacaggtgcatgccagtgccagcacacctggcttttcttttcttttttytttttttttttttttttttgtagagatgacatcttgctacgttgtccagactggtctcaaactcctggcttcaagcaatcccctgcctcggcctcccagtgctggggtaacaggtgtgaaccaccacaaccagcctgctaaactgaattccaattkccctcctcaaaatttttcttccccaggtatttttatttcatcatatttcacatatttgcccatatcccaaagctagaagaaagctcctttcctgtcctcactagaaataatctatccaccagtcctatctactttttctccaaactacatcataaatccacactcttctctctacctttgccctcatcaccaaatttaattcaccaccgtttctctcctgaactactgtgttatccttaatcggtctcccttttcaactttttttttttaattatactttaagttctagggtacatgtgcacaacgtgtaggtttgttatatatgtatatatgtgccatgtcagtttgctgcacccattaactcgtcatttacattacatatttctcctactgctattcctcccccatccccccactccacgacaggctccggtgtgtgatgttccccgccctgtgtccaagtgttctcattgttcagttcccacctgtgagtgagaacatgtggtgtttggttttctgtccttgcgatagtttgctcagaatgatggtttccagcttcatccatgttgctgcaaaggacatgaactcatccttttttatggctgcatagtattccatggtgtatatgtgtcacattttcttaatccagtctatcattgatggacatttgggttggttccaagtgtttgctattgtgaatagtgctgcaataaacatacatgtgcatgtgtctttatagcagcatgatttataatcctttgggtatatatgcagtaatgggattgctgggtcaaatggtatttctgcttctagatccttgaggaatcaccacactgtcttccacaatggttgaactagtttacagtcccaccaacagtgtaaaagtgttcctgtttctccacatcctctccagcacctgttgtttcctgactttttaatgatcgccattctaaccgacatgaggtggtatctcactgtttttaaaactcattacagagctaagtggtttttatttaatgtaaatttatatcacattacttttctactcaaaactccccaatggtatcccattaaacttataaaatttcagttttctttctggctcccaaatttctttttttttttttttttttttttttttgagatggagtctcgctgtcgcccaggctggagtgcagtggtgcaacctcggctcactgcaggctccaccccccggggttcacgccattctcctgcctcagcttcccgagtagctgggactacaggcgcccgccacctcgcacggctaattttttttttgtatttttagtagagacggggcttcaccgtgttagccaggacggtcttgatctcctgacctcgtgatccgcctgcctctgcctcccaaagtgctgggattacaggcgtgagccactgcgcctggccccaaatttctttatgactaccttctgcctttgttttttgcatatcacagtttgtcattcctccttccctctttttccctccctagtgcatttagttgaacaagccaagcccatttccaccccaggaactttgcacttgttgccaggttcctccaggtccaggtcttcacatgatgtagacattctcatctatcactttctcagaaggatgaacatgaccctttaaggtagctcttccacactccagtgactctgtcccattactctgctgtttcctcatagctcttaagtctgaaactacattgtttttctattcttcatttacaaataaattgtacaagggttggcacttatgcactctctcatacactgctgtcctgccattactgggagtcacataataggtaccaaataaatacttgttgaaagagtaaataaatgtataaattaaatgaaatcagcaaaactatatgtaaatctaactagcccaaagaaattttatttcctgtaatatcattttgttcaaaaaaccaaacttaggagaggagaaatataaacaaacaagcttgggtgaagtttaaaacrtatgtgattaaatctccattgtcatttatccttttccaaaaagtgggaaatgttgcatgatgattaaacagaatacaatgtggtttcaagaaacatcacacaatcctgtttgttctaagataataaatatggtgttgaaaggaagaaatttataattactaacagcagcaggtggatgaatctctttggtattcatatgaacaaaatactaacattttaagtaaagttaccttttccatgaatatggttttcactcacaaaaaaggattttgttcaggttcaatatgtccatagttttaaaaccatgatccaagaaccactgggggtgggacagtggagttgggatatggagaaagacaagctaagtgggatgctgcttttcgacactttgacaaagatcatccttaccattatctcctcataagatacctagaggaaaaggtgatgacattatatatatttggaagccacaagtgtggtacatatttctagataataagaatggaatgagctaacatttattgggaacttactctgtcctgagcactattatctaatttagtcctttcaatatctctaagttactattattttgtttctcttttccttttttttttttttttttttttttggtttgtgttttgagacagggtcttgctctgttacccaggctggagtgcggtggtacaatcccagctcactgcaacctccacctcctgggttcaagcgattctcctgcctcagcctccctagtagctgggattacaggcgcctgccaccatgccaccttttcccaacctcaggaataatatacttaaccaaccagcattaaactccatgcatgagtttttctcatatatgaaaagaagaaagagggggggatcctcgtagagtcgcacgggcgagacnnnnnnnnnnnnnnnnnnnnnnnnnnnnnnnnnnnnnnnnnnnnnnnnnnnnnnnnnnnnnnnnnnnnnnnnnnnnnnnnnnnnnnnnnnnnnnnnnnnnnnnntattatgagccaccatgcctggcctattttcttcttttcatatatgagaaaaactcatgcatggagtttaatgctggttggttaagtatattattcctgaggttgggaaaagggagtcttagtgaaaacaaaaggtgtattacctaaagggctcattttctacaggaaaattatggtggctagattatgttttattattctctttcagttttagagaacaacttgtaatggagccttcatctcttgagctgccggctgacacagtgcagcgcattgcggctgaactcaaatgccacccaacggatgagagggtggctctccacctagatgaggaagataagctgaggcacttcagggagtgcttttatattcccaaaatacaggatctgcctccaggtaagaatgctgggaaggtttttaaattttatttatttatttatttttgctactgcatgtgtttattataatctttgaaaatcattgttgtattacataatagagctgttgcaattatgtttgaaaagcagaagatccctggtgctctcaatcaacctgtcagcctaccttagcctcaaattatctgttttctcccctcctctgaatgaaatacatgcagggtacttatactgtcaactacttctctgaacaattgagtgactgattgaaaattacaggcagatacatttacttgttctctaagcacttgggattcaaagcaattattttagaatgcagtgttagaatagctcttatattctggcacttagtttataataatatgatgtttgtcttagagaaaatattgttttgtgacctggatatattaggagggatgttatatgaatagccatctttgcatgctgtaaagatggcgagtgtaagagttaccaagaaaagaaacaacaaatgcccaacaaatacatactacattttaaaataatgtagtaatctgactctgttctgggtttgaggaagtcatttaaaaaaataaaacataagtagcaaaggtataacaataaaaaatgattcatcatatttagctttactccattttacattaataaaaaaggttcccaggttgaatggaattagtctaccaaactgggtttcgcatcctttataatagtctgattccatttttattcagattaaataaggtacaattttgggtccagtactcaggagccatgaaggtcagctaatacaattttaggatgtctggtttgtataacactaatatatactatgtaataaatgttaaaaacacctatttgtcttcagctatgtacccaacaacctatagaattctggaagaatgaaagaagagaaatacctgtatctgacttaaaattgtgtagtataagttgagggagatattgatggaaatgacagctagaagagacgaaataaaatgaggctataagtgatctgagaccatagaagaaaaatcttctaggtcattctagaatcgaaaattaaaaggacatttttatttgaattgtaagggataaaatactgctatgggagtgaattgtgaggaaataaaatttaggaaaggaattcttaacggaaatgggagataaggggcttggtgatatgtgcatcacacaatgtggaaacctttagaaacagcgaggacccacatgagacaagtcaggtctggttgatggtggccctgccctgatgtgctctctggcctacagggctcctgtactgagtcagaacccagtttaaaaatagcattgtacagccgggcgcggtggctcacgcctgtaatcccagcactttgggaggccgaggcgggcgggtcacgaggtcaggagattgagaccatcctggttaacacggtgaaaccccatctctactaaaactacaaaaaattagccgggcgtagtggcgggcgcctgtagtcccagctgctcgggaggctgaggcaggagaatggcttgaacccgggaggcagagcttgcagagagcggagactgcaccactgcactccagcttgggcgacagtccgaggctccatctcaacaacaacaacaacaacaacaacaaaatagcattgtacctcactaatcaccaggaaaatgcacatcaaaaccacagtgagatatcacctcacacccttttctatgactactattaaaaagtgcaggatataaatattggctaggatatagagtgattacagcccttgtgcactcttagtgggaatgtaaaatggtgcagccactgtaggaaagagtatggcagtttcctcaaaaaccaaagaatagaattaccacatgatccagcaatctcacttcaggatatattgccaaaagaattaaaagcaagatccccaaaagatattagtacactcatgttcatcatagcattattcataatagccaaaaggtggaattaacccatcatcaatagatatgatggaaccttattaagttttaaaaagaaccatgctctacatggttcacatgaatgaactatgagaacatcatgccaagtgaaataatccagacgcaaaaagaaaaatactgtgtaattccaattataccaagyatctagattggtcaaattcataaaaaccaagtagaatggtagttgtcaggaacttggagagggagaaatgaggagttattgtttaatgggtataaaatttcaattttgcaaggtagaaaaattctggagattggttgcacaataatgtgaatgtacttaactgaattgtacacttaaaattgttaacagaataaattttaggtgcattttagcacagcattttaaatatttatcaaaaayaaaaacgttttccccttagagaaaagcagcattgtacatataatcacttctgttatacttaaaagttgacttagtatcctaattataggtataatattgattttgattagttatccaatagaaagtaactgaaggattacaaccttggataagtcattgctgattcttaaagataagagatagaaattggtttaataaagaatttaaatagtttgcttgtttaaaaaatatagttttgctggacacggtggctcacatctgtaatcccagcacttagggaggcggaggctggaggatcacttgagtctagaagtttgataccagcctgggcaacatgacaaaaccccatctgtacaaataatacaaaaattaattaggcgtgatggcatgtgcttttactgccagttactctggaggctgaagtgggaggatcacctaagcccagtagttcaaggctgcagtgagccatgatcacaccactgaactccagcctgggtgacagagcaagaccctgtctctaaataacaataattattctaataattttgaatgatgtaaaactttattaaccccaagtgttcttctacatcagtgattgtcaaaatgtgatcccttgaccaaaagcatgaggttcactagagatcttattaaaaatacaagttcttgtgtcctaactcagaattactgaatcagattgttaaggtgaggcccagccttctattctagatcctctaggataagatggtatcctagagttgggtcaattaattccccttcttactattctcacgccagttgcatcttaatgtctaaggattcatgtattcggcaaatatttaatagtcagttaccctactcgagacacttctgtcagaacggttcagagaaccaaagagcaaagctgtcgcatacttgaacgtgtatctagtatgacaacagataataaccaaacttagaaacaattatgctctaccatcatgtagcactctaaatgataatgagggctgtgaagataagggtgtgaccttacccacagaaatatggtgaggtgccatctgaacaaagatgacagcacagtgaggaagtgagcctcatggagcacaggtgaagctgagcctggtcgtggtccacgtttatgctgaacagaggtaccaactcaggagcacatgatgtaggagcaaaaagataacacatttttcataaccatcacaaggggcatggctgatgtttctataacaaagacaggttagcaagagaaaaacccagggaaaacttgagattttatgctaagttgaatgaaagaaatgaatagatgtgactaaatagaattggaatgaaatatgatctaaccgtaatcaacagacagtggcggggggactcagcaagtcctgtatttttggattcttcttgctccctcggtgtagcatttcttccctctgcatatagggcaggacacctgtcatatgaaagtctatccgggagaagggaaaaggtcagtgcgtgagctttctaggttttaaggcttgctgtaggagaggatttcagtttctttgactcacctggctgcaggacacagggcaggggattggagaagatcagaaagaccttgtttctgaggccctctcaaatctccttcagttccaagtactcagcattccaaggcactgtattttagaatactatgttctgacccccaacggtgttgaaatttccttcttttttgttttgacaagatgtgaattcatcaggaaaccagtgttccctatcttattaaagccttccaagagcatctaaaaatggtaaagcatgtyggattatttttggagactagcataacaccaagaaaataaactttctttagcagttctgaacaatgaaaaacagaacagaaataaacaagttttgaacaaatgaaaggatcacaactcccaatatgagatttttttttttaatcttgaagaaagtctacaggcatagcctgtacttttttgatgtttttctattatatattatgttttctctgggtttctaatataaattttattaaaataagtactttcattttctattcttagatggtgcctgagatgttatcagagaaaggggtcaaaaatatttttaatcagcttttgtacttatgttcaacattgtcctaaagagcacagctgaaaaataaacaagcaaaagaaaggaggaagagagagagagaaggaaagaaaagaaagaagggaggaaaaaaggaagakataagaaagaaataaaaagaaaagcaagagaaatgcaaggcatacatgtggaaagatatctttctaaaatttttaaaataataaatattcctgtttgaaacatcctcatacctaaatttctgaaagcatactggatagccccataagatatatggcttttgcacagacacaggacaaagacaatctttttcagagtgtcaaactgccatcccagaaacaagttgtgcaaatttacatttcctccaacagtaaagacaattgcctcactaactttggrgatcagtaggattgtttttgtttctgttttttggagacagggtcttgctctgtcacccaggctggagtgcagtggcgtgatctcagctcactgcatccttgacctcccaagctgaagtaatcctcctaccttagctcctggggtagctggaactacaggtgcgtgccaccatgcccagctaatttttgtattttttgtcaaggcagagttctgccatgttgctcaggctggtctcaaactcctggactcaagtagtcctcccgcctcagcctaccaatgtgctgggattacaggtgtaagccaccatgccaggcaggattagcagttttaagaatctttgctcattagataataaaataattattccattcttctttgaatttgcagttcttagacaaccgttggagatagttttcataaactccttggtcattgctttcctttttgtcttaagttgctcataatgtatacatttaattttaaactaaaataaatataagtggtaatgtttcattttttttctcttaaggatataaactccttctctcatatatcttaggaattttaagtgaaaatgtccagttaatatagctggctaatagcagaaccagaaatgggttccaaatattgtgactgctagcccatgtgtcttgactcaatcctgcttttacttttttaaaatcactcaattgaagtataatttatggaccataaaattcatccattttaagtatacaatttaataatttttagtaattgcatatgattacactaccattataatccaattttagaacatttcttcattccatttttttatctctagcctaggcaaacagtaatctactgaacttgctgttattttgatctatatagaagattattaactcaaagaatttttttactattaaactatatttggagaaaaaaaaacggtgctgctttcaatattcttttcatagtcaaataaccctctccttcaatcttaccacacatccaggagagagatcagtaaattgacacccaactttagtagactttagtaagtacttataaaatttaaagttatccaaacaagatcttttataattttgcacatgtaattgtttggactcagataaaattggcatagcaaaataatcatgcttcagtttgtctccagggcttccatataacataatagagagcctcttaaactcaactgcttttaggcttagaaggctgtgacagatatgagttatcagtgcatgaaatacaggaaagcatacttttctctataaactagaatcttttattcaacaacagataaagatatgttaaataaaagattttatccagctataaaaggacatgtatttataactgtaattttgatagtctgataaatctctaactttcataagaaaacaattaagagtattccttagttaaaagtttaattttgtagacattgagacttttttttttttagatggggtctcactctgtcacccaggctggagtgtagtggtgcaattttgactcagagcaacctccaccccctgaactcaaagaatcctccctcctcagccccccaattaggtgggactacagatgcataccactacacccagataactgtttgtatttttggtggagacagggtttcaccatgttgcccatgcttgtctcagactcctgagctcaagtgatctgcccatctcagactccaaagtgttgggattacaggcgtcagccgccatgcctggccaatattgggagcctttcatgttacttaaattctgcatttagtggacatatttgtaaccttgttatttcatttgcattggactgtctgctccctgagtgtaggaactgtcttctttctctgtgaatgtgtgggagtcacctaggcagaccttagtgtggagtgacgtccaatcatgaagagggaacagcatttgcaaacacacaagagaaagcatagttactttgatccctaagaatagttttacatgatcaaagaatgtcatgtaaaaagctgggtattggtaaatggtaaataataaggtayggaatagggaatatagggtactaggatgattggtataatagggtgaagagtaaatgagtgcgtgtgggtacctaacagtaagtctgaagaagtaaatgtaatagaagtggaggtaaaggaaaatattcagtaaatacatgaaatactcattaaataaacctgatttagtagtaggagaggcataccatgagccataatttctgttttaggtgaatagtggtgatattcactgatacaattaacttgttttggaaactattcattgaaagaggaactagttttttatttgtttgtttatctcttgttgccctgtcacctgtggccttgacctccgagtccaagtggcagctgttacaagcagtgagaatcaggcagtgacaaagaagaaaagacaaataatgtgtgtgcactctcccttgagaaaggtttcagtttgcctcatgagttttaacrcatatatagacctaagcccctgggccagtgtttggtcatggccctgcctatctgcaaagaagactgagtctaaaacacaatttttgttcttggtggccacatgcaaagctaacaattctatttctgtaaaggaaaaatgaaatgcatgtagggtacaactagcagttgagtttagttagaaggtagaaatttgacagtcatcagcatttaggtaatagttgaaactgtgggtacggatgatattatcttggcatcatacctaagtgagaagaaggtggtagaaacaaaattctaggcattgacaaagaaagaactctagaaagagccagagacacagaagaacaaggaaagtgtcgtgttctaaaaccaagggaagagacatattcaaagaaatcagagggcttgccatcatcagctatcacaaagactgtataagcctttcatttagcagtcaggagagctttattaaattgtcttaactttaacagcttcactggaatgacaggcagggaaactatgtacatttctagatgtcattgaaggagtaaagtatcggaaatgagatttttaggcttcttttccaagaaaccttgctgtaaaaggaaacataacaaggaacaaaaggaaatgaatgaatgcttttttcaagcaaggtgggggcttgaatatgattgtgcattgagaagatggtatgggaaaaaaaagagacagacagacagataacagaggtgaatgtgattttcagccaagcagagtgcatgctggatctgttgtctattcccacctttttcagctcatggagcccaatattctaagataatgcaaattgctgaagacaatctttccctactctctaaggatatattggccccaatgtctaaggtcaacattagccagattgagattttacaaagaaatctcaaggtcccaaccaacttttccatatttttgggcaatatgataccaggcataacatacctcagccacaggacaaaggactgggaatagaaagattcttacaaggagagtacactttcacctttgcctgggacaatgtttggtcttttctgtcttgccatatgaactctttcctcaaggaattttatccacaaaggcgtggaaaatctcttttgaaatcctcgaaatacgaagtgtctctccctcagatgccataccactcatcaatctagacctcagagagaactaatgggttcaaaattaggcaagagtatctaaggagtgtgtgcaagtagactgtagtgatcctacatttttctccatcttcttcctgaaattataggaattatattcaaagtccaagaagcttgttgggagcatagccttgtatggggcatccctattggaaaaaggacatgaatatttcctcagygcaccaccaggaaatttaatattatgaggtacatagcaacacaaaaaaatcttcactcactaccttctgaataatagtaaaaagaatatacttttttatttagtaaaatgcagaaatcatacatctctacaaattttacaacatgagcacctctgtgtaacaagatcctagatcaagaaacataacattgccagcacttgggaaaactgcctcgtaccccctttcaggaactccttctttagggttaaccagtttttctgtagccagtatgcgagtatcaacttgtggcatgtgaatgccacaacttaatatgtatttaagaaaatatgtttaatagaaaataggtttaaaatgaaaatatgtatgtttccatatatagagagagatggaagaatatatattttcttttttaaactaatgccatagttyaattatttaagccagacagctaaaactgcttctttttgtccaagtatatggctcacccctgtaacccagtactctttggaaggctgaggcaggaggatggcttgagtccaggaattcaacaccagcctgggcaacatagtgacaccctgtcactacacacctttttctgttcatacttctatttaacaagtgatgctggaccatgatgttcccagcattttattttttaatttcatcctaagatctgctcttrtcccccattaagaaggattggtagaatgttctctttcctaatgacagaagtatgaaataacttgttcatcaggagagtttattattgatattgttaatatttaaatacacattccataaattggaatattttgttgtacagtctgagatttaacacatgtatagaattayattaacacaccttctctcagtatatagaacaatttcatracccccaaaagactcctttatgctagccctttgtaaccaatctctccactatacctctaatccctgataaccactaatctattttatatccccattgtcttttccagaataacatatgaagaaattatatactgtatttagtctttggagactggtttcctttacttaaggaaatgcctttgagattaagcaaagttatgtcaatgaagtgtttcattttattgctgaatagtattctaccccaagaatggactacagtagtttattcatttgtccactaaaggccatttgagctgtgtccaattttggtgattatgaatagctactattaacattcatgtacaggattttgtgtgagtgtaaattttttatctaaattttttttttaagatcagatagtaaatatttcactcttgacaggtctcatgtattctttttttatttttatttttttagaaaaggtcttgccctgtcacccaggctggagtgcagtggcataatcacagctcactgcagccttgatctccctggctcaagcaattcttccatcttagcctcctgagtagccagggctacaggcgtgcaccaccacaccagtctcattttttaactttttgtagagatgaggtttcactgtgttgcctagtctaatcttgaacaaagctcaagcagtccttattccttggccttccaaagtgctaggattacagatgtgagctactgcatctttccaggtctcatatattctttctcttctttttttcctttgtcttctcctagtttttcttctcccatttataaatgtaaaaacattcttagctttcaggccatacaaaaacaggtcatgggcttgatttggaactcaaaccacagtttgtcaagtcgttttagaatgctataagttgattgctggatcatattataggtatatttttaactttataagaaactggcaaacttttccagagtggctgtaccattttgcattttgcattgccaccagtaatgtgtgggaatrtctgttgttccccatattcacccccagttggtattaccagttttttgttgttttgttttttagtcacatatgtttgtataagtatcttattttggtatttatatgcatgttcctaatggctaatgaacttaagcattaaacatttcataagcttatgtaccatccatgctctagagaaatgtctgctcaaatattttgactacttttttttaattggattttttgttttttaattgttgagttttgttttttggggattwtggagctttttgtttttttgttttttgtttttttaaagagacaaagtcttgtttcattagccaggctggagtgaagtggtacaatcatagctcactgcatccttgaccttcttgggctcaagcaaatctcctgctaattttaacagacagggtctcgctttgttgcccagactggtcttgaactcctgactttaagatatcctcccactttgacctcccaaggtgctaagataacaggcgtgagtcatgttttcagttttaagagttctttatgcatttcagcgtacaagttgtttgttgaatcaatgatatgaaaatattttctcacagtctgtagctatctttttattctcttattagcgtctatcacagaacacaagattttaactttgaggatgcacagtatatttattttttcttttatggattgtgctttagttaccatgtctaaaacctcctcatctaaccatcagtcttaaagacttctttcgcccataatttatttagaagtgtgttgtttaatttccaagtatttgaacatttcccagttttctttttattactgatttgtagtttaattgtattgtggttagaaaacatttgttaaggtttgtttttgacccaggacaatggtctgtcttaatgactctccatgtgcatttaaaataatatttattctgcagctgtttgctggagtgttctttaaaagccagttacattcatttggttcctggcgtttttcagttctggggattatttgtctgctaataaaatgtagacctagttcctcagaggaccctggtcacagatttatggacwtaatcataaatcccacttaagcactgttccaaattgctgaaactcaattcaatattaccagcaactgtaacaacacaacaaataaatcacattagtaccacaattattaagattgggaaagwtttataattagacagttgtcacccaacaaattcatattagatgcttatatttttcttggtaataccagagatccaaataatcaaagcacaaatgaaacaaacacagctgaaatctttatgctttctattactacttataatacaatcagcaacaatttcaggttcaccaatctgcagaaacattgtatatctttagggatgtgcttttcttctttttccttaaatttttggttaaaaaaaaataagcaacacttaagtttctcaaatgaacagtcataatatgttaacattttaacctacgatatctaaacaggagagcattctaataaaacccctaaactcacctggccttttagtagagtattatctttacatacagatatggaggaaaatatgttaaatgtaaattcttttttcttctctctatcttcatttatttatttatttatttgagacaggatgtccctttgtcatctaggctggaatgcagtggtgctgtcagagctcactgcagcctcaacttcctggactcaatcgatcctcccaccacagcatcctgagaagcagggaccacagacatgcaccaccatgtctggctaatttttaaaaatttttccccaggctcagtgtccagctcctgggctcaagtgatctgcctaccttggcctcccaaggggctggaattacaggcatgagccactgcacacagctgaattcttttcaaaaccagcaaatcatacatttctcatagaagttaacttccacagagatgttttattttctttttctttttttttttcatacttcgaggccaaaaaattgtcatcaagatcctagcaattgctgcagccaatcccaggactttgcttccacagtagctattgagcatcaaatgctctcttagatcatagaccacaactttgatgagctttcattcttagctatgtcttaggattctcctgaaatatgaagggtaggaagttgtattccctagttcaagggaaaaaaaaaatcaatttaaattcaatggtattaaaaacaatgaatatttacttcaaaaaattattataaagcaaaatatggtacaaactagtttttccttctaaactcaaatacctagctagtaatattccaaaaataaacattaattatatggaaagaatttttaaatttttgcaatgctgaaattaatcagtgggaatactgacgctcttacctgtgggtctttgttcttagagctcccaagatggggcgggccgctcccaagatggcagcaagccttttgttctctgaccttgggttcttggcctcacagattccaagaatggaatcttgggccatgcggtgagtgttatagctctattagaagctgtgggtcacggaagaaaaccatggaacccagcgactagtgttcagcttgattaggatgaacccaggcacttagctgtgcaggaacaatggtgagcctttagcccgatcgggagcagaaatgggcaccttgctggatcaggagcacagcagacactctgctagatccagaggggtgggagtcaatggtgggtctgagatggtggcaaacagcagtggtggacccgggtgggagtcaatggcaggtctgtaacagcggcaaacagcggtggtggacagtgagcaaaagctcagctcaagccgtaacaaacacagaccagaagagcgtgcagttgcaagatttaatagagtgaaaacagagctcccatacgatgggaggggacccaaagggggttgccactccctgcttgaatgcctgagtttatatcccgatcattgtccccttgttgtgctctcaggcgatatatgatttgactgtttcyttacctcctgcttttagcctaatttgtgtttcagtgagccctctttactacccgattggtcaggtgtgagctgagttaccagccctgtgtttaaaggtgggtgcggtcaccttccccagctaggcttaggaattcttagtcagcctagaaaatccagctagtcctgtctctcagtcccccatctcaacagaaaaacccaagtgctgttggggaagttggccgaacaacgctcttaactgcttcctgctgaattggggcatagtaggggtcgtgcagttgagatttcctcaggaggagtgcctttgatgtcatcaacataggagcatgggctaggaggctggtccaggggcccacagtagatcttagtcatgcatctggggctccatttgaagaatgatttgtagttttatagctttgattctggaagacacaaacttaacaaggaggttaaagatacagggattgaaatgtaggcctgaagtgcaggggaatatttctttggcacacgtcacaggccctgactatctgcttgatagttttgaaaaggcctggtccagtaaataatgattcggccatctgatgggtgctatcaatgcctaagtgaaagtgttactggggggttctagctcccagagctcccaagatggtggcaggccccttccaagatagcggcaagcctcttgttctctgacctggggttcttggcctcaaaggttccaaagaatggaatcttgggccatgcagtgagtkttatagctctattagaagccatgggtcacggaagagaaccgtggaacccagtgactagtgttcagctccattaggatgaacctgggcacttagccrtgcaggaacaatggcaagcctttagccygatcaggagtggcagcgggcgcctcgctggatcaggagcacagtgaacacactgctggatccagagaggtggaagtcagtggtgggtctgcaacggtggcaaacagcagtggtggatagcaagcgaaagctcaggtcaagccgtaacaaacacggaccaaaagagtgtgcagttgcaagatttaatagagtgaaaacagagctyccatacaaagggaggggacccaaagagggtagccattgccagctcaaatgcctgggtttatatcctgatcattatccctccccctgtgctctcaggcaatagatgattggctatttctttacctcctgtttttgcctagttagcattttagtgaactctctttactacctgattggtcagatatgagttaagttgcaagccccatgtttaaagatggatgcggtcaccttcccagctaggcttaggaattcttagtcggcctaggaaatccagtcagtcctgtctctcagtctcccttctcaacaggaaaacccaagtgctgttgrgagattggccgatgattgctctaactgcttcctgctgaattggggtgtagtatgggctgttcagttgagatttcctctggagaggtgcctttgatgttattaacttggagcatgggctagcaggctggtccgggtctgcagtagattttagtcatggactgcatctggggctccatttgaagaacaatttgtagttttatagctttgattctggaagagacaaacttaacaaggatgttaaagatacagggattgcagcaggtggagcttgcagtgagccgagattgcaccactgcagtctggccttggygaaagagcgagactccatctcaaaaaaaaaaaaaaaaaagatacagggattgaaatgtatggcctgcagtgcagggggttatttttttgacacacttcacaggccctgactatctgcttgttagttttgaaaaagcgtggtccagtaaataatgatttggccatctgatgggtgctattaatgcctaagtgaaaggtttggtgaagggttttaagtaatttctattgtttagttgcaggcaaaagtatttttcctttttcggtggctagccattctgaggggaggaaactacgtccttgtgaggttccccgttctatttctcctgctgagtagcagcttgggttcccagaggggattaccccatactaggggtmcttctataagcatttttaatggagagttctgccttgtggctcttttagctttaatacccgcttggcagtttccttctatttttctttccttttctttctgatgaccccggcagtgtaagactgccacctctttaggtttctgtacagccaataataatctcctaatggcttcctgatgtttgataggtgttccctcagaagttaggaattccctttttttccatattgctgtgtgggcgtagaggactaggtaagaatactttgagtctgtatgtatatttacccttttccctttttttaattctagtgcccgagtgagggctattagttctgccagccgagagctagttcctggagtgaggggattactttcaagtattccattattactgaccactgcatacctcgcttttgaagtcctttttttacaaaggaattttcattaatatacaagttgagttagggattagtcaagggaacctctagaaggtccctcgagtggtataggtttgaacaattacctgttgacagttatgttttatctttttcattgtttggaagaaatgtggcggggttaagagttgcgcaagtatgcagttgcagcactggccctttaattaatagagcctgatatttaagcaaacgattgtctgacagccacaagtctcctttagcagtgagtatgctgtttacatcatgagatgtccacacagtaagatctcttccctgtattattttaactgctttacatactaagactgcwactgccgccactacccgtaaacaatgatgccaaccctttgccactacattaattttcttacttaggtatgccatggtttgcaagctggtcccttgaacctgtgtaaggactcctggagctatttctgttttttgtgacatatgaagaaaagtcttgccccgttggtaagcttaacactgagtcttgggttaaggcctttttttagggcctggaaagctgcttttgctttaggagtccattttactaaatgggtattggctttctgagcttccttaattagtgtatataatggcctggctattttgccgtacctgggaatccatatttggcagaagsctgttatgccaaggaaccttttatttgctttagggttttgggatgaggataagccagtataggctggatacatttcttactgagggccctggtgcctttggataattttagccctaagtatttaacctgctgtaagcagagctgagcctttggtttggaaaccttgtagccacaagtggtgaggaagtttaaaagcgcttgggtggcttgatggcacaaggttttttcaacaggcagctagaagtagattatccatgtaccaaaggacaagactgttcaggtatgagaactgtctcaagtcttgagctaatgcctggccaaatagatgtgggctatctcttaacccttggggtaaaacagtccaggtgagttgagacattgggtttgaagcatctttaaaggcaaataagaattgagaatcagaatgtacagggatgcagaaaaaggcatccttaaggtccaggactgtaaaccactctgcttcctctggtatttgggaaagcagagtagaagggtaaggtacagctgggtatagaggaacagcagcctcactgataatcctgacatcttgtactaacctccactgtctattgggcttctttactcctaaaattggaggattgcaggggctattgcatggttttactaggagtagggcttttaggtccttaacaattttttggagtccttgttgggcctcgggtctaagggggtactgcctttggtagggaaaggaggtggaatcctttagtttaactagaacaggacgggcattatttgctcgtccatattgtccttctgttgcccagactttaggattaattcctttttcaagcaggggacaacaaacgggtgttccttttcctatgttcaggtgtataatggcccctgcttttgttagaatgtctttccctaacaagggagtggggtttttaggcataattagaaaagcatgtgaaaagagtaaagttccccagtcacagcttagtggctgggagaagtatctagtggctgtcccaggaccccttggatagtgacagatctggaggacagttgtccaggacaggagagtaagactgagaaggccacgccagtgtccaggagacagttaacctcctggccctcaatggttaagcatacccggggctctgtgagggtgatggcatgggctggcgcttgccccaggcaccctcagtcctgctgctggatcatctggttagtggcttctgactcagaggaccttcgtcccctggggcagtgggccttccagtgattcccttgacataaggggcatggacgaggggggtggcttatttctattagaacaatcttttttaaagtgtccttgtagatcgcactggaagcaagccctattaggcattcaatttgtccagactttccctgttccagagcctccgaagtcgtgcttgcctgagggccatgactaaagtggtggccttttctttatcccgtttatcctgttctgcctgctcctcctgatctctattataaaaaaccgaggttgccaagttcaatagggtttctaagttttgctctgggcctaaggtggacttttaaagtttttttctaatgtctgcagctgactgagtgataaacttaacctttaagattagttggccttcaacagagtcaggtgacagagagtttgcttcctcaatgcctcccttagtctctacagaaaggcagtaggattttcttcctttccttgtgttatagtgaacatcactgaataatctataggcttcttcctagttttccttagtcctttagcaagcaagttagcaaatgtctgtggcaccaattccatgttctgattctgtgtcccaatgagggtctacactgggaactgcctgctggcctgtggggaattgttctttttcctctgttgtcatcctatcattgacctgactgagataccagagatcaccaaactctcaggctgcagttatggcagcacttctctcatttgggattagtgtctgatctagcagtaacattatatctctccatgtcagatcaaaggattgtcctaacccttgtaaagcatcaatatagccaacagggttatctgagaatttacctaggtctattttaatttgcttcaagtctgacagggaaaaaggtacatacactctgacaaggccgaattctccagaatacattttaggggtgtttttgccttggggggaatgttttgccagcacccctagtcattttctgatgagcttagttctacagtgttctctatggtcctttccacggtgtgtaaccacccatggacctctgcttatcggattagttgtgctcaccaatgtagcagtcctgcaccccttttcccgcctttcttgaccacaaagaaagggatccgggctgctggattctagtggtcctttaccagcgtgcccaacattgcctttgtgctcaggggtgagtcctagagctgggctgagttcctgagtctttcataacaaccyggctgcccatcaagatgcattcccataaacaacagttcttatgcaaatycgtttcagagagggtgaaggtaaccttttgagtcaggagtgagatggagttctttgcccactagggtctttgtccttctttacttttgtaggaatatgccctaaatattgatattaagctttttgttgccccagattaagtccttttgggtacgaaatatgagagagggatcctgtttatcttatgtgcctttttcctacgaggagagcaaggagaaaaagatgggcttgctggttttgtaggtactttaaggcttggctgagtgcaaacagctcacacgtttgacagaccaacgattagggaattctcctaactcttcttccacaagagtctcactatcaattaatgaatacccattgtggtttttttctcaatcacccgagaggaagcatctatccttgtgtcccgaagggagttcctcctaggtctggtmggacctttgtatggtaattaagatttaaatcccctgttaggaaagctgctaggttaagggaattttcagtggttagtgttaaatcaccgttttctaatagaatagcccgatactttaagatttttgagttagtaagctacctttttgcttttttgacttaggatagctctgaactggttatgtgtgctcacaataaggtttcctctaaaggttatttttctactttcttctgttagcaaagcagttaccgctactgattgaatgcatttgggccatttgtgggttactgggttaagaatttttgataggaaggctacaggttgtcagtggtctcagtgtttctggctatgcccttgtttacactgacaacaaggtagtattggagtattatagggtcacagagaagaccttcgattatcaattataggttttaaatttaccctggcttttaaaggaatagggcacactgtttttctttactacttctatctttctatttctttctctctctctcatctctgtctctctctctctcctctctgtctctttctctcccttttctctctctctgcctctttctctttctctcctctctgtctctctctctctctcatctctgtctctctctctgtctcctctctgtctctgtagatggattttggaaaacagcagaaggaagttcgcttgttgaccccatttgccactataggaatatgtgcctccctttagtttactcaatttgctttcatcctgatctattatgttgttgtagacccagttccagaagttaaagtactaggtcatcagttctaaggccctggccaaggagccaaggcttgaagattgtattgaagattgcattgtggggtggtgggtcgggggatgctgggtagaaattaggggaggagagcatcttacacaatgagagaggaatcctagccatttacaaactcagggcctggcaagagtggtggagaacgggtcccacataactgcccatgtcaaaagttatatacctaaattgggaggggcaccagggacaagattccctggtttcatagcctagatgcctaaggatgcagcatagygcttccttagatccctttggagatayaacctactctaatacttgggagagaaagtgaaagtctgaagcattagtatctaggaggcagggattggaggaagtagattcagaggtaaggagaattttggggctacactttcaagaaagtcatggttaggacccaagaggtatgggtcagaaggacaggtaggggcgcacacatgggcgactgttgagtagagacttctagcctgcaccatgatctcgaccggccaatgccaggggttcaggacgacagctttctgcctctagttgacccttggcatccctaggaaaattgtgaaagtggaagctggttccaggcagaccaactctcccaacccagaagttgttagaaagccttttcccaggaagcctcacacctgagtctttagtccggtggccatgctaatcgtttttaaccagcygacaggtgcccggtattttcctccaattctaaggtagaggacagaatagcaagcaaaagtggtctgatattactcactgctttggagaatccccatacgaggccaccaaatgttaccagcrgatctttgttcttagagctcccaagatgatgrtgggctgctcccaagatggggcaggccactcccaagatggcagcaagccttttgttctctgacctgggcttcttggcctcacagattccaaggaatggaaacttgggccatgtggtgagtgttatagctctatcagaagccgtgggacatggaagagaaccatggaaaccactgactagtgttcagcttgattaggatgaacctcggcacttggttgtgcaggaacaaaggtgagactttagcccgatcaggagtggaaatgggtgccttgctggatcaggagcacaacctgccagatccagaggggtgggagtcaatggcgggtctgcaatggtggcaaatagcagttgtggatggtgagcgaaagctcagctcaagccgtaacaaatacggacaagaagagtgtgcagttgcaagatttaatagactgaaaacagagctcccatacaatgggaggggacccaaagggggttgccactccctgctcaaatgcctaggtttatatcctgatcattgwccccccgttgtgctctcaggtgatatatgatttgactatttctttacctccttcttttagcctaatttgtattttagtgagccttctttactacctgattggtcaggtgtgagctgagttaccagcgttgtgtttaaaggtgggtgtggtcaccttccccagctaggcttaggaattcttagtcaacctaggaaatccagctagtcctgtctctcaatacttcaaatattctttacacagacaagccatttaaaaaaaattagagcttacctttgcttttccatcaaaacatattgttacttctaggtttcctcttcaatttgcaaaaggaaaaggaaaatataggtaatttctcarttaaacttacacctgattttcaatatgagtttgtttattgagtgtttgtatatgtgtgtgtttggcagttagaagtatgctgagatttttattcttttagcctttgggggaactggactggcccttcacctctgtcctaatgtagctttttaattttattacaaatgggaaacaatgtaattttctgtatgtttcatctgtgaaaagtattggaaagttttgagttcatatgtattttattattgaattttaaaatatttaaaatgaacttaattaaatcttaaattacagtaaccttatgctgtagtaagttgaaggtaagctaccttctgtgaccttgaataatttaattaaattgagaagtctgttttttttttattatttgttttgtttttaatgggtaaattaaatgccaggcctctgaagtgagttcatataaggaactggttgtgggatttttttttaaaaaaaatatgcctatattagagtcctacaccaaaaaaatttagagtttttgactcaaacccaggcactggtatttgttcaagctcctgatgtgatagaccagtatctaagtcctaataaaatatgaaatgatcaatttttttttttttgagatggagtcttgctctgttgcccaggcttgagtgcagtggcacgatcttggctcactgcaagctctgcctcctaggttcacaccattctcctgcctcagtctcctgagtagctgggaacacatgcgcccaccaccacgcctggctaattttttgtatttttagtagagacagggtttcactgtgttagccaggatggtcttgatctcctgacctcgtgatccacccacctcagcctcccaaagtgctgggattacaggtgtgagacaccgtgcccagccaaaatgatctattttctaattatataattcaaaaaattgtttcaggaatattattctaaccagttttaaaagtaacatatcaatatatgtatgacattaacattaatggcagtttgtctctttcaaacacagactatctggtacttgtatctaacaatgtatttacaattgtgatcatatatggctagtgttgatgctattaataggatgttccaaacatatatcaagtttttttttttttgtggaagtcattatgataggtaatccatatttgtagaagatataagcctttacacaaagactttaacataattacaattcagattaaaattagctttattgggatgccaacaatgaatatattaaagggacatacaggcataactcattttactgcactttgctgtttgtattttttttttaatttcaacttatattttaggttcatgggatatatgtgcaagtttgttatatgggtaaactgtgtgatgccaaggttttgagtacaaatgaccctgttacccaagtagtgaacattgtacccaataggtagtatagttcctccctttatagctatatgtaccaaatgttagctcccayttaaaaatgagaacatatagtatgcagttctctgatcatgcattaattcatttaagataatggcctctggctgcwtccatgttgttgaaaatgacatgattgcattctttctatggctatgtagtatttcttggtgtatttgtaccacatgttctttatccaatccaccattgaaaggcatctagaataatttcatacctttgcttttatgaatagttctgcaatgaatctacaaatgcttgtgttttcctagtagaacaatgtatttttctttaggtatatacttggtaatggggttgctgggtcaaatagtagttctattttaaattctttgagaaatctccacactgctttccacagtggctgaactaatttacattcccaccaatgatgtataagtgttttatttctttgcaaccttgtcaccatctgttattttttgatgttttagtaatagccattctgactggtgtgagatggtatctcattgcagttttgatttgcatttcactaacaattawtgatgttgagcattttttcatatatttgttggctgtatgtatgtcttctttcaagaagtgtctattcatgttctttgcctttttttttttttttttttctttgagacagagtcttgctctgtcccccaggctggagtgcagtggtgtgatctcggctcattgcaatctccacctcccaggttcaagcgattctcttgcctcagcctcccaagtatctgggactacaggcctctgccaccaaacctggctaattttttgtatttttagtagagacggggtttcactgtgtttgccaggatggtctcaatctcctgacctcrtgatctgcccgcctctgcctctattctttgcccattttttaatggggttatttgtttctcgcttgtcgaattgcttaaattccttatagaktctggatattaaatatttgcaaggaatagtttgtgaatatcttctcccattctgtaggttgtctatttactctgctgatagtttcttttgctgtgcagaagctctttagtttaattaggtcccacttgtcagtttggggggtttytgcaattgttattgaggactcagtcacaaatcctttgtcaaagccactgtccaggatgatatttcctaggttttcttctaggaattttataattttaggtcttacattttagtcttatccatcttgagtcaataattgtatttggtgaaaggtaggggtccagttccattcttctgcatatttctggctggttatcccagcaccacctattgaataagagttcttaccccattgcttgtttttgtcaactttgttaaagattagactgttgtagatatgtggctttattctgggttctctaacctgttctattggtctatgtatatgttttggtcccagtaccatggtgttttggttattgtagccttgtagtttgaagtcaggtaatgatgccatcagccttgttctttttgcttgggattgctttggctattcaggctctttattggtcacatacgaattttagaatagatttttctatttctgtgagaaatgacataggtagtttgataggaatagctttgaatctataaattgctttgagcaatatggtggttttcatgatattgattcttccaatccatgagtatggaatgtttttctatttgtgtcatctataatttttctttgagcagtactttggagttctccttgtagagagctttcacctccttggttagatgtatttcttagtgttttacygttttttcgctgttgcaaatgggattgtattattgatttggctctcagcttaaacattcttggcatatagaaatgctcctgattttttaatgttgattttatattctgaaactttactgaaattgtgtagcagttctaggagaattttggtggagtctttagggttttctaggtatagaatcttatcattagtaaagatagataattttttttctatttagattccttttctttctttctcttgactgactgccctggctaagatttccggtactatattgagtaggagtgggagatatctttgatttgttccagttcttaaggagaatacctccagcttttattcattcagtatgatgttcgctgtgagtttgccatagatcgctcttattgttttgcggtatgttcctttgatgcctagtttgttgagggtttttatcatgaagggatattggattttactgaaagctttttctacatctattgacatgatcatatggtttttgttctcaattatctttacatcctgaatcacatttatggatttacatgtgttgaatcaattctgcatcccaggaataaaacctacttgaatgtggtgaaataactttttcatgtgcttctggatttggtttgctagtattttgttgatgatttttgcttcaatggggatattgacccktaattttgttgttgttgttgttgttgttatttctttggcagattttggtatcgagtgwtactggcttcctagaatgagtcrgggaggagtcaccccctccttaattttttgggatagtttcagcagtgttggtaccagctcttctttgtaagtctgatagaatttggctatgaattcatctggcacaggactttttttggttggtaagattttatgactgattcaagttgaaactctattggaatgttcagggtcttagtttctacctggtttagtcttgggaggttgtatctttccaggaatttatctatttccttcagattgtctagttttcatggataaagtgttcataagagtctctaaggatcttttgtatttctttttttttttttttttttttttttgagatggagtttcactcgtgttgcccaggctggagtgcaatggtgcgatctcggctcaccacaacctctgcatcccaggttcaagcgattctcttgcctcagcctcccaagtagctgggattacaggcatgtgccaccgcacccagctaattttgtatttttagtagagatggagtttctccatgttggtcaggctrgtctcgaactcccaacctcaggtgatccgcccacctcggcctcccaaagtgctgggattacaggcatgagccacagcacccagctgggatcttttgtatttctttcttccttttttttttttttttttttttttgagatggagtcttgctctgtcacccaggctggagtgcagtggcacgatctcggctcattgcaagctctgcctcccgggttcacgccattcacctacttcagcctccaaattagctgggactacaggtgcccgccactgcacctggctaatttttttttgtatttttagtagagacagggtttcaccatgttagccaggatcatctccatctcctgacctcgtgatccatccacctcagctcccaaagtgctgggattacaggctggagccaccgctcccggctggatcttttgtatttctgcaggattagttgtaatgtcatctttgttgtttctgactgtgcatatttgaatcctctgtttttttctttttaatctagatagtagtctgctgattttgtttatccttttaaagaaacagcttttggtttcattgatcctttttatgaatatttaggagttgatttcgttttctcctttgatttcagttatttattctactagcattggggttagtttgttcttgcttttctagttcctcttggtgtgttactaaattgggaattgcagatcattctaacttactgatgtaggtgcttagcactataagttttcctcataatactgtgtttgctgcatctcagagattttggcatgttggttgtgtctctgttttcatttatttcaaawttttttttgatatctgccttaattttattgtttaccccaaagtcattcaggagtaagttgcttaatttctatgtaatagtgtacttctgagagatcttcttggtattgatttctacttttattccactgtggtctgaaagtatggctggtatgatttcaattttttgaatttattgagacttgctttatctccaagcatatggtcaatcatagagtatgttctgttcacagacgagaagaatgtataatctgtggttgatgggtggaatgttttktagatgtctattaggtcccattggctaagtgttgaattgaagtctaaaatgtctttgttagttttctgacttgatgatctgtctaatgctctctttggggtgttgaaatccctactagtaytgttaaccatctaagtcttttcataggtctagaagtacttgttttatgaatctgggtgctccagtgtttgctatgtatatatttaggatagtttagtattcttgttgcattgaacattttatcattatgtattgcccttctttgacctgttttattgctattggcttaggcagtctggccactccttggcaccattacagtagcttctactggggctatggcagctgatgcctagctgctcagggatccaaggcctgtgcggctccactgggcttaagtggtacccctgcaaagattccaggctggtctctgtgttgatttggagttccactgaggtcaagggcttctcccatgcccaggattgcaaaggtccatggcagatgtttggatcccctgggaactctcactcatcaaccctttcctgacttagggaactttccccaggtctgtactggtcccaggtgggcaagtccttggctttgctcctctcttctctgtgagtcctcttgctttcttgttgaatcccaacatgacatcttagatgatctacttgaagtcgtagcatttactcaccactttgttttctctccatgagagcagcatatactagctacttctagtcagccatcttgagcacctcacctgttttccagattggaaaactgcccatatctggggagctctgcatttttctttagagtgcttcacagatactgcattttttacaaattaaaagttagtggcaactccaattccagcaagtctataggcatcatttttccaagaacatgtgctcactttgtgtttctgtggcacatattggcaattctcacaatatttcaaactttttcattattatatctgtaatagtaatctgtgatcagttctctttgatgttattattgtcattatcttggggcaacatgagctatgtccgtataagatggtgaactttatcaataaatgttgtgtgtgttctgactgtgctagagaccagttgtggggatatgtgagggcagccatgttgccaggcacatgtggggacaagaggaagacaagggaaatcaccatgtttrgtggacccagtttctaatggcctttatttgcatattaaagcttgcctgcaggctctaagagccggggctttcctgttagacaagaaacatttctggagctgctttaaaagaaacaaaaacttcccaaggacgccttttcatctctatctgcctaaaataatttcttaataactcctataacaaaaatatactgcaaaagggtcatacctgagaagtctgcttgttgagttgtggtaatttttgcataaatattctagaaatatattgtatgaggtgggaagtggtggtagtgagcagatcgtgagacatcagcttaagtattcattaactacttcaggaaactggagattggaggtctccagtgggaaggagattttcatgaactcagaaaaaatacttcataagggaaagagctaaccaaaaagcaccaaagctggactaagattttcttgcctttctttttccactccattggaggaataagaagcagcagcagtgaggaacaagaaaataaattgttaatagacacattcctttgttccaaactgcagtttcctgaacttaagtcaagcatgagctagggctggggagaagatttaaatctgaagtgatgttgatattttgaaactagttcctaggttaagcttcatataaactaaaagagtaagctcataaggtccacagtggtggamatttttgatgcactaaaatgctcctcaagcaataaagtgagttttcagaaccatgagctttatagcaatcatactgtagccttttcaaagaaaggagcattccagaagaatggctctaacactgttgacttaaggactaactggagcaagccctgcttgttaaaagctgaaaatcttgagctcgtaaacaagtttgaagtcaagtgaacttttaagcagagtgctatgggttgaattatgttccctaaaaattcatgtgttgacagcctaaccacctgttcctaatactgtccttacagaaataatcaagttaaaatgagatattagagtgggccctaattcaatatgttgtgatgttcttataaaagggggaaatcgggaaacacacaggcatactgggagaaggccaaacacacaagagatggccatctgtaagccaagcagagaggcctagaacatattcttccatcacagtgcttgaaagtaatcaaccttgtcaacacttgattttggactcagagcctgcaaaattgtaagacaataaatttatgtttaagctacccagaagctttagttctagaagccctagtaaactaggggggcttgttacatgaagcaagtattcccagctcaaggaggatttactgaatgtggagacttggctgatagggggaactgatgaactcttttaacatgcycaatctgtgccagaatttgaagtgtgaccctaagacaaggctcaaaaatctctgccttctttttggaataaagtttttaggatcactgccacatttattttttaattatctatggcttttttaatcctatcataacaaaaaagaggaattgcagcagagactgtatggcttggaaagcctgaaatatttactttctggctttttacagaaaaagtttgccttgccttgcttaaaacaagggtactggttacagatcctgcctgctgggtattaacagaacaaatgcagcaaatgatgctgatctgaacatgaacccacaggatccccagatcatgacacctctcagtgtttactcagagtagatctggacagtatggattaagaggaagaaattgagacaccttaccccccttttcctccctctaataagawcaggctaaattcaatgcaggaagactttccagggaataagaagcaaaggcactaaaagaaagagttggaaaacaatacctacaagaagagtgaactgcggtcttgaagcattgtgacttaaccaaaattttgggatttactaacaggacatgtgttaatcaagcagttcactttgaaaaggaaagttctagtaagctccacggcctttgtgaaaaggccattgaagtgagagagaaaaccaagaggaccattgagaaactgcaaaaaatgtatgccctaattggcaatacctactttaaagaaaaatgtaataatatcacaatctctacaataaatgttttagcatagcactaaacccacaatatgctaaaaaagttgtcagtagaggagacagaaaataatcctaaagaacaggattgactggtgtacattaatcctgacttgcctttgggaaaaaaaggtaaatacaataaatgcttcagaaaggggaccctctcccacttcataagcattaaatactaaacaagatgtgcaacagaatccacaygacattgagttgtgcaagagtcagcagttggcactgaaggactgggaactatggatgaacccagagctcccatattctcaagggttgtgtagagaaagcacaggagccatgaaaactgtggatataatcccaaaggcactaaacttggactcaagctataaggagattatcagtaatgtccaaaccattgatgtgataaccttttattaaaaaaaaaaaaattaaatagagatggagtctcactatgttgcccatgcttgtcttgaactcctgggctcaagtgatcctcccaattttgcctccaaaagtgccgggattacaggcatgggccactgtgcctggctgacatgataaccttgaggatgggaaatggggaggcatatctaatcctagatccaggaaataatggataccttaaccaagaggaatcttctggcacacatgtgtaaacaatatatacatatattttattggtcaggcttaaaagatgccaatgaaaaacaatatctataaaagggatcaggttgaaatagatggtatgtctttaaaaagtctttaaaggtttaattaagtagtctgaagtaaagaccaacatagtacttaatgattccagtgaaatataaacaagaagcttagtctttttttccctaagatataagagaaaactcagtagtttacaaatgtgattgtaaacttgtgactttctggactacgtcttaagcacatggattggtttgtttgcagtgggttaactgtaggataaaaatcatcaaagtttgatttatatgaataagaagtagatgtagaaaacaatctttgcctatacatgtgttagtactatgtgtacgtgtgtatggatatagaatgaaaaaaaccrcataaatccagtacatctacttaagttatgtaaataattatttgcattttttaaaaaaattgccatgtctacaacacaaattagtaccgtgttagtacttgactaaattctggtaatcttcttatacaattagataggctgatgtatttcctaattaaaaacatttgtttttaactcttttctaatgctttggcaattcatgattggaagtasttgctaatttagatttcctcatggagcacagtaaatatgagagatcctcataatagcctctataggtttaaattatattttaaatgtaaatgcaaaasttaattattttttagaggacctgatgtcatccttgggagtaatttttaattactttttatccttcttagagttkattgtattaattatttgtactggcttaacaataccatactgaaaaagcttttattttttttttttttttgacatttcttctgtttcagttgatttatcattagtgaataaagatgaaaatgccatctatttcttgggaaattctcttggccttcaaccaaaaatggttaaaacatatcttgaagaagaactagataagtgggccaaaatgtaagtattattttaaaagctactactctacatctcatacaaaaatttacaaaatcacattaggttgtctaatatttggaaagatgtgtaatagaatcctagtacagtcatcccttggcatctgtggaggattagttccagggcctccctatcattccaaaatccacaatggtcaagtcccttatatacaaatggcatcatatttccaaagaacctaggcctatgccatatactttaaataatctctagattacttataatacctaacacagtataaatgtcatgtaaatagctgttatactgtattgtttagggaatagtgacgagaaaaaaagtctgtacatgtttagtatatatgcagccatccatttttttccccaaatatttttgatccgcagttggttgaatccatagagagggaatccatggatacagagaaactttagctgctcagtagtctcatttgattgatgaaataactgaggatcagaataaggtgacatagcaagctagtggcagaatcaggactaaaaacttttacaatatttaaacgtttaagttcctctcatgtgttgacatctctaaaccacatgtaatcattttattttatttctttagtaactaacagaggagttaatattctgaagcttaatwtcttcatgattaggctaaattatcaacacttacttttatgataaccagaaatattttctaattatttgaaactgaaaaatcaatatgaagatgagccaaacttgacagttaggaaaacgtttcagaaagatgaaaccaaaccaaatagaatttcagaggaaaaacatttggctgtcatagaaactcagaatacattctttacctttcttcattcttcatgctactggttttcaaattgggaacaatatccattctttaaagtttagtaggccagtcacaatggctcatgcctgtaattgcagcactttgggaggcagaggtgggcagatcacttgaggccaagagtttgagaccagcctggccaacgtggcgaaacctcacctctactaaaaaaatacaaaaattaggccrggaatggtggctcacgcctgtaatcccagcactttgggaagctgacatggatggatctcctaagctcaggagttcgagaccagtctgaccaacatggtgaaacctcgtctctactaaaaatataaaaattagcctggcatggtggcaagtgcctgtaatctcagctattcaggaggctaaggcaagagaattgcttgaacccgggaggcagaggttgcagtgagtggagatcaccactgtactccatcctgggcgactctgcttcaataaaataaataaataaataawgtttagcttacactgtgcaaatgattacaactatggctattagataacactgtgaagttcttaattttagtgattaagaacgtaatttcacaacttgatgtaagaatgatagtttatataatttattaatcatgttataactttatctgcataacttttatgcataatttgcaaaatacataccaccacatttgctctagcaagttttagtatttaatgaatgggggtcatagttaataaaaatggttaatattcatttttggccttaatgtaagagagggcagataattagattgaatgaatttgaactttatagagtgtccttgcctcttggatattcattcagcaaggttgtgaatttttatcccctaagcatttaaaatatattctgccctgctattctattcatatccttatggtcatccacttaagtaagaaaccggttgattattttcaagactttaaagttgcatttcaggaaagcacctcatgctcttctattgttttgtcttttatatttcaccttgtgatgatggaaaatttcatmattttaattaaaccttcttactgagttttcattagacagatgattcagaaaggctgtatattttaatgcttcaggcaatgtacagtgaattaaagaagacttctaagcaaatggacatctattccatcytcgctttgtttattttagtcttcttgttttaagctgtagtgactcagtcaacatcatggacccgcccataaatgtctgtggtgtttgggatgcctgatcacctgcctctttttcctacctcacccatcrtttttgatcccaaaagtgtttgctcattattattttttacctcccaaatatttagcttaaaatcccacttctgatgttttccagctgaagttctgttgggaggaaactttttctctaccaaatgagtacttaggtcaaagtgattgagggcctgccaattaattgacaacagacaggttaacaggagaaaagtttatttcacactcagatacaagaattctacaaggggtagtttgatgaacagccatgggtaagggtttatataccagcttgactaaagggaagagttttagagcttcagtgggaaaatatgaaagtttctattgggttttttcatcatgatgctaatgggcagtatccttcctagctggaagctcccaagagggagatgaatggcagctgaatttgtacctccaggtgctaaggtccatctacctctgaggatgggtcagtagcagctgtatttttaggaggctttgcttaagtttagataaatttctttctgtggctgctctttgttcagatgtgttcaaagtagtcagaccaggcatagtggctcatggctgtattcccagcactttgggaggccaatgtgggtcactttagcccaggaattaaaaccagcctgagcaacaaagagatggatgcagtggctaccatctgtaatcccagcactttgggaggctgaggcaagcggaccacaaaagcccagtagttccagaccaacctgggcaacattgtgagatctcaactctacaaaaaaatacaaaaattagctgggcatggtggtgcatgcctgtagtccaagccacttgagaggctgaggtgagaggatcatttgcacccagaaggtcaaggctgcagtaagctgtgattgtgccactgtactccagcctgggctacagcaagaccatgtctttaaatacatacatacatacatacatacatacatacatgtagtcttcatgccacttcagtggtctgttggtctcttcagttttcattctcactgttgccttgtttttttgtactaaaatcaaaccctgcatgtgttcagttgcctctacatccagggcctcccattattgtggtaaattttatctgatcacttcttcctctttgcctccctctatgccacttctgctctacttcttggttgatactcaagccaggtcagtgactccctttcttcttgaccaatggaagattatgggaatcactgagtcaaagaggattacacacttattaaatactacaatgcacattgaaagtagttgcttagttgaaaaagataatgttaaaaatgtataatcttgaccaggcgtggtggttcaaggctgtaaccccaggactttgggaggccaaggcaggcagatcacttgagttcaggagtttgagaccagcttgggcaacatggtaaaaccctgtctctacaaaatatacaaaagaaatttagctggatgtagtggcacatgcctgtagtcccagctattcgtgaggttgaggtgggaggatcgcttgagcctggaatgtgggggtttgcagtgagctgagattgtgacactgcactccagcctgggcagcagagtcagacccagtctcaaaaaaaattataatcttaacagtaacataaaaattagagtgcttcaacaaagcaagattttacacaggcatatagatgtcaaatctctgtctatccaagtattgtaaagtaggaaatgccatttggctcacggattccatcttctccagttttatggcctattgcagacatattgcctaccacacctaagtattgaataaatgattttttgtcataatgcagcctgattttgtaattcataaggctaccatctttgatttcttatactaaggaaaagccaagaatagaggtacaactagaaatattttaggatctgtcttggtttgttcccgctgctatacaaaatacctgagtctggataatttatagagaagagaaatgaatattcttacaattctggaggctgggaagtccaagatcaaggtgctggctgacttagtgtctggtaaggtctgctctctgcttccaagatggtgcttcttgctgtawcctcatgtggcagaagaggcaaacacctgcctcccacctgttttacaaggktactaatcccattcatgagggctctgcccttatgactgaatcacctcctaaagactctacctcttaatactgtcacattggcagatcaaattttaacataagaatttgaaggggacacattcagatgatagtagaaccaaatgatttctaaaacttacacttatttaaggaaaactgtgaaaatagttttcttagaatcttttacctctgtgttagttttaaaattctattaccattaatttgcattttcattttcaactctatgggatttctaaagtagattaataacacattgaagaatatatttgttttgcaaaatggcaatatttaggcaattccagtattctgaaatataaaactttttgggtgattatatttatttgatacttaataattataagtaaaaaggttttgtaacaagaagaagcaacaatatgcctgaagcctatgggtctgttggaatgagtaggcaataggcatgaagtatttgggaataatagtttatattaaatatttactaatgacctggattatttaatgaagaataacattggttaataatcataatgccacaattcagctagaacagaaggatatatcagtcctaaagagcatattgtaagctgggagatgggtattatgttcctaaaatagaatcacaatattttaggtcatttacattgtcaaatctgctacataaagggtgttctctctttttcataagagcaaaaacctactacagttttgtctctacagggattcttctaagaactgtgacagtttaggtaagattatttaaagacaaaaatgtccctttgaattaaatatcaggaataaaccacagagtttactttacatggcagtgtgtgtgtgctgacaggacactgataaaacatgccagagagatgtagatgcctccttcagacccctctagtctcatttaatttaaggatttcttccattaaaagcaatagtgtttgaataagagagcactaagaaaatacatagaatggcatgttacaaagatttttcacaacatctttgtttttgtttttctaattaacattctttttttggagtcagggtgtcactctgttgcccaggctggagtgcagtggcgtgatcatagctcactgcagccttaaacacttgggcccaggctatcctcccacctcagtctcctgagtagctacgactataggtacatgccaccaagcctggttaattttttctttaattttgtagagacgacgtctccctatgttgcccaggctggtctcaaacacctggtctcaagggatcaacccaccttggactcccaaaatgctgggattacaggcgtgagccaccrtccctggcctctcaacatctttattggctaatcatcaattggatcatggaaaaaaaattataatgtaatgaaggcagcccatgaaattgtaattatttacttatggaaggaagctttctaaaaacagggccatttttcactttgtgggatggttacagcatggtcctactttaaagaggatccaggtttctattaacttcctaattttacatcctgcaattctaattttgtgagtaaatactcctagtagatgtctcagaaaacacccacttatagcaatgatttattctgtggcagtgagttaactcnctcccatgctctcttttcctttccagcatttgtaaaagaagattacatctatgctgcgactattttaagtagctttgtttgaacaatatattttttcttaactttaatactgatgtttataacggcactttaatctacatcaactctttctaatgacaggccactttactttgggtttatttgggtaacactttctaaatacatttcactaccccaggctagtgggctaacaaaatgaagaagcagactctgtgtggtattttaaagggagggagatgccaaaagcattgcaggaagaaacacatccttaaagattattaccacggtgtctaccagagtaaggagtaggtggcataacattctgagatataaattctctgaggcagaacatagaattttactacctaaatgtaataagatgtattgtgctatcagcaaaggccatggagctctatgtgatgaaaataaaaaaggatccaagtatcttcctttaactaccatttaatgataatgatttttgtctttagcatttatattagaaatcaagaaagaggcaagctgcaggctatctaataataatacaaataataataactaacaattgcccctctcttccatccttagttcttagcagcctatgtttattctcaaagaaagtcctcttccttcatcttagtttatatggtaatagaaatkttagtttaaaaattgtgttctacaccacatgctgatgaaggtagttttagcattagatttacattaggaaagaagactcagaaacagggtactatgtaaccgtctctttcacatgttatctcatttatttctcatgggaatcctttaaggtccatattgttacccatttacttgtacaaatgtggaaaatgaagccctatagcttccaataaatgtggtctcatgaccagtactgacctggagctggcttataccagatgtcaaaagccaattattaaatactcagaatttctgttggtagtatgaaatcacccatgatgggagtatttataccttggaaatctgcaaaggaggaaaaacagtgctctagtcctctggtcttaccaccccttttagggagtaccagcccaccagcaccagtttactgacacagattcaacccaggttggtactatacaaaaagcacattttcattcctttctttcaagatgacaaacttttggattcytaaagaattaagaactgttacccagaaaaaatgggttttattcttttggtgagtaacaaaggtctttctggagacatggatgatgctggaaacatcattctcagctaactaacacaggaacagaaaaccaagcaccgcatgttctcacccataagtgggagttgaacaatgagaacacatggaatcagggaggggaacatcacacactggggcctgtggggggtgaggggctaagggagggagagcattaggagaaatacctaatgtaggtgacgggttgatgggtgcagcaaaccaccatggcacatgtatacttatgcaacaaacctgcacgttctgcacatgtatcccagaacttaaagtataataaaaaaaaaagtcagaggaatatatagcaggctcaaatatttayctttttaattgtgaaatcatctttgcaatatttattatgaaataagttttaaaatattgcataattctaaaatatgatttaaaataaattatttctctgtagtaaaaaaaaatagagcaggttttgatcaatagaagtttgattacttggcataagtaaggaggacactgggagttttcacaaaagcagtgtctcccagaggaaaagtgacagggaagttttatggggtgatagggaagaaggtgcatcatctcatgtagaggaagagttccagttgcggagatgcagtgagtaatcacrccagtgcgtagatcgcatcttatggtaatgaagctatagctcctccccagggtggagactttagcatggtaatgaggaaatttcacacagactcgtctatgagttgctggggtctgtcagaagcttgccctaaccaacaaggtgacagcattacacaccaggcttgggaaaaaaacaagtgatagggcaggaggctgtaaaacaggctgatggttcaactttattaaatgttataatccctggagacccccctgcctgcttacagaactatcacattcagggcatcataagatacaacaatgtaacagcactcagaggcgcttcatcttaatcctctgttttaatttcttctatgtttttcaagtgtatttgccttcttcatttcatggaaatttcttgaaagttgaagtactctatgtattttgcatttttctactatgcctcctgggatacttactagaataataaaattgagctggaatgtgacagatgaaattgctagcaaatatgtcaaaccaagtagtattggctttgattattcataaattttgttatttacctataaaatggtatcatgagtataatcacattttatacacttctattaaatttacagattatagctatatttcaatttataatcattttagtctctagccttacaaaatagtatggaagttttagtatagatactacattctacaggtataaaagtagtgttcaaataatcttaaaaattgcaaaataactgagaccaaaaaaattagactctagaatatagcaaaatattaaaataacatatgaacaatctcccccattcctcacaaaaagaaaataaatttaaaaagagaagttaaaagacattaatcccaagtattatatattttgttttaaaaaggcctgattttatataattactaacacayagaaaggtccacatagaaatgtttatttgctaaagctgatatttgaaataatcacacacatgcacataaaagctaagatatgtttatgtccgttttcaatttcagagcagcctatggtcatgaagtggggaagcgtccttggattacaggagatgagagtattgtaggccttatgaaggacattgtaggtaagtacaaaacactgaagtttttccaaatgaattgtaaagatgttatcatttagttataaacacaggctcataaagtcaaaatcttattgaagaacatagtgattttctattttaatctataatagtaaaaaggaagtacactttcaacttaaatttgttaactcaaagattgctatggtgagcataacaaggttatttatataaaaataaaatatatgttatttttttctgtcatactttaaatgtaatatttatcacacatgaaaaacacatacattgtattaatttataattgaatacatttcataaaaatcaactgaaatgaattttctataatttaactatttgatataatgaacattttcacatgctaaaggtgtaaaacaccaatcatgtttttgctcatttcaatttaatctttggtgatctatttaaattttagcttcatgttactgaaaatgacatagctgatgctgtttttagtctaaaatgtgctatcctaaagagagttatatatactatcggtggtatttaagatagttttagatggtaaatgtgttaacattttgaaaaaatttatttaattggcttaaatattcagcattgtttaaaatttaaggtactgaacaaaaaaattaatgatattttggtaattggagtggtgctatttggaactattttaaggacttagggaaaactcaagttttcaaatcctttttgaaagcttattctcttataagcaaacataaaaatatctttattgcttcattccatttgaatcttgaccagtaattagagagaaaatcaacgtggctggaagggaaatggagtggggaaagctggacttatgcatagaaaaaactatggcaactggcaaatcattaaaatctggagactatcttgtttatttaaaaagtaattattgattttttgctatatgtcatgacttgtgggagctctgaggacataaaagtgaataagggctgggcatagtgacacacacctataatcccagcactttgacagtctgaggtgggtggattgcttgagctcaggagttcgagaccagcctggccaacatggtgagatcccatctctacaaaaaaattttaaaaattagccaagcatgctggcacacccgtagtcccagatacttgagaggctgaggtgggaggttagcttgagcctgggaggttgaggctgcagtgagcccaaatcgtgccactgttgttcagcctggacgacagggtgacaccctgtctcaaaaaaaaaaaaaaaaaamaaaaaacgaacaacactcaccttccttatcctcatagactgccagtaaaggaagatgcaaataaatccaaaattaatgtacatacataagtaaaatacaaagaaatataaaattaatcacactaccaaagaggcataattttccagttgatttaggactgaacacatgcatgtaactactyttttttytaaaacctcaccaaagaattytgaatggaatagaaaaaaaaattacaamgtytaaactgcagaggacaaaatagaatgccaaaggagatgataataatatctggggagttggctcgctgatagacaagtggtaattgcctttctcaaaaaaaaaaaaaaaaaaaaaaaagtaaaccaaatcctaatctcccaatggcaaaaaaataaaaagccagctgctttaccctgctaatcacctgaccatgaaaagagccaaattctgtaaaatatttgaagagtaaatttttctgtaaaatattctgagccaaatatgagtggtcatgacccaaggcacagtctcaagaggtcctaagaacatgtgcccaaggtggttgggttgacaaaagacatcaatctacacatgtgaagtatccataggtttgggggagaggaggggacaggcgcacaggtgggaagtgtagtagtttataggtcataggattatagatggagtcaaagattttctgattggcaatttattgaaagagttaagttattatctaaaaacctggaatcaatagaaaggagtgtctggaggaagataaggggtgatgaaaaccaaggttcttattatgtagataaagtctcataggtggctgcccttacagacaatagatggcaattgtttcccattcatacctgtaaagggttctagtctctcagttcatctcttcaggattggaagggactgaaaagggaaagatttggttatattcttcatattcttgacagatgtaaattttccctcacaacagaaggctttgtagggccactcaaagtatgtcaaagagacatattttggggtaaaatattttgattttcttctttatctgtcatttgatgttacgccagagtaaggttggaaagtaagcttgtcatataggataaaataaaacccatctggtgagattttatggtttgtaggatgttattccccaggcctcttaggaatttgggcaagacagaaaaaaggtcagagtttagtcctcacacctccagaaggtagtgatgaaaatatgaatttttaaaaaagaagatttgttgaaattctgtttaaaatacrattagaatatcagatccccttgccaacttgatgctgcaggtgaatactcccacaccccatttcaggagatgactagaggattaatttccagaaaagggaggagaaagggtctccagactgccatgacaaacaccacagactgggtggcttaaacaatataagtttattttttcgcagtactggaggctagaaattcatgatcaaggtgcaaagtgctgtcagggttggtttctagtaagggttctcctcctggcttctcctcttggctgccttttcactatgtcctcacatggcctttcttttgtgtactggaggaaacagttctctggtgtctctcacacgtcttataaggacacctaaggataccagctctaccatatcaagccctcacccttatgactgcacttaaccttaattactaatttgtaggcctatccccaaatacactcacattggagattagggctttaacatatgaatttggggccaccaactcaattaataatatataccatagttgtaaggtttctgtatcggtttgaacccckagagcacgtcaatagacaacacgaggtggtgtggagcaacatgctgttttaatgagcgcctgggtgcaggcgggctgaggcctaaaatggcatcagcaccaagtgaggacaagacaaaggttttatagtctcctgtaaacaggaagtgttctagtctgacataactgctgcgttgtacctggatggcctctttctcgatcttcagggttacrtgtcttccggccagggtagctgtctttcggtcggctctcttcctgcttctgatatcttgctggcgcacgccgctgacgtaagtagccttgcgccttcgtactgggcctgagaaggaaggagttattcatctccttaagctttcaggcctcagggagaatcgtacattcccgtctatttggttgtagataaaagrgataaggggcctctttctcaataactacttcacgtgtgatatagggggtggtgtgggcaccttggaaaaacaaaaccttaatkttttgggtattcttgagagacgggttggtatccacattgtccttgtagtaggagcatcatctgtattgtctggaaacgcgtctgtgcctgcaagacagttatgttgagaggacaaggaggtgtcaacagggagaggtatagcctcatttgctgcttcacgaatgaaagactgtgtctggattaaggaggggaggtaatttctgagtgggttagagtttggtaagggtggaggccctaagataaaagttcggccatacatgattttaaagggactataaaaagaggctgcttttggtgttgtgtggagtctcatgagggcaaaagggagattttttgtccacgactggtgggtttttagagccagcttcrtgagttgcgctttaagtacagatttagttttttcaactttgcctgaagattgaggcctgtagggtgtgtggggaacctacttcatatttagagatgtagagacaccttgaataatttggctgatgaaggccggcctgttattgggctggatggatgttcagagtacgaaatggggaattatatgcatgatgagagtttgtgtgacgacatttgcaccttctgaagttgttgggaacatttttacttacctggagaaagtatggacaaagactagaagatagcagagcggcatgtgagtgaggtttacttgccattcttgccttggtacctggccccaggcttggtcggtaggaaaaggtagcrgccagagggagccttggggtgrcactgagtggcagatagagccagactgggtaatttctcagacatggctggaaaggtgaggacaagtgagaatagggtggaaaagttgcaagagaggtttgtaaccgacatggaaagagttgtggagtctttggaggtgaggaagattttgagagtgaggaagaacaaagcacctttccttgacataccatggtccttgcttttgaaggttttgggctcagaagtcctgcttttcttctgaggagtaaagaggagagaacaaggacagggagagaaactggccttgcacggatcatagggctatttgtttcactacctgatctgttagcgcatttccagccgatatgtgattgtctggggtttggtggcccctgcaatgaatgatggcaactttctgcaggagcctgatagcttgaaggagtttgttgatgagagagccatttatgacaggagtgttttttgcagctaggaaaccccgttttttccaggtagacgagtgtgactgtactatatggaacgtataatgaatgacaaattgaatatatgttaatttgttgtccggctgtcagtgtgagagcttgagtgagggcaatgagttcagcttttgggaggtagtgcctaggggcagtggattggcttcaatagtatgtgggggcggggggcgggggacactatagcatagccagcatgccggcgtccttgctgtaagaaggagctgccgtctacaaaccaagtaaagaaggggttcatctgttagatttggaaaaggtataagaaaggtttgaacagtgttcacacagaagtgtttagggtctttggcggttgtagcttcaggtaagagcatggctgggtttagatgggagctggttagcatagtgatttggggggtttctatgaatagagcatacagttggaggagtcatggggcagagatgagactagtacactgcagtgagttggcatgtctttgatgttatgggttgaataaactgttaggttggcatggagagatagttttaggcttttaagggttaggacagcagctgccgccaatggtcggaggcaggcaggccatccaagaactgaggctttaagctgtttagagaggtaggcaataacctgaagggtgggtcctttagactgggttagaacacctagtgtaactctatgctgttggtcagtatagagggagaaaggtttggtgaggtctgggagagtgaggacagggctgaggtgagagccttccagagtagacggaaaggttgggtaataggctgtgcagatttttaaggctcatggagtggggctttagcagcttggtataatggtttggcaagtagagcgaaggagggaacctagagcctaaaacatcccactaatcctagaaaagagagagaattttttgcttagtttgcagaggcaggagggattggaggagagatatgcagtcagctgtgagcccttgggttcacggggtaagagctagccctagataggtgactaagggggtgcataattgtgctttcttagaggagacctaataccctcgttttgtcaagaagtttaaaagagagagatagtgtgggtgttgcagtgtttttgagaggggctacacaggagcagattattaacacattgaaggagagtggatggttttagggatagggwactgaggtcaagagcaagggcctgtccaaaaagatgggggctgtctctgaaaccttgaggtagtatgcaccaggtgagctgatgtgaaagtttggagttggggttttcccatgtaaaggcaaagaggttttgggaatcaaggtgtaaaggaattgtggggaaaaaaaagcatcttttaggtttagaacagaaaaatgggtggtattagacagaattacggaaagtaaagtatatgggttaggaactactagacatactgggagtacagcttggttaatgagcctgaggtcctggattaagcgataagtttcatctggctttttgacaggtagaactggtttgttaaaaggggagtttgttgggtggagtaggcgactggtgaggaggcgaaaatgataggctttaggcctatgcgagttgcttgggagatgggatactgcttctgtgataggaactgggtgggctttttaagggcaatgtggatgggggtgtggtgttttgtgactgagggtgtggaagtgtcctaaacagaggggttaactacggatgggggataaggaaaagttgcatgttttaaggtggcaggttggaggagtagaagaaagttagaagccccagaggggtctgggttggtgcgttgggtactatggggaacatggaagtgaagagtagtgtggagctttgaaaggagtggagtttggcatgagggtaggactaagaaagtgagtgaaggaaaaggtgtatagggagcaraaaagtggaggggtggcttggggtttggagacttgtctattaatttctacaatagagacttgggagaactcagtgggtcctgaaaaattaggtaaagcagtgtaggttgccctggtattaattaaaaaacatactggcctacctgccaccatcagggttacccttggctcggatgaagagatggtagttgccagggtgtccatttcagggcaccgtcactcttcagtggcaaggccgatgagatcctaataggaggttttggccagcttcggaagggatgggggcggtccttgtggggtccgctgacagtccaacctccggtggggtcctccgcaaagggggcatggcctggtgggcttacctgggtttgggcattgtctggaccagtagccttcattgccacacttgaaacaggcgccaggtggaggtggattgctaggaggcttccctgttgagctgcagccctgcgggcctggtggaggtaagcatttgagactacctgtgttttgcctttcattttcctcatcacgattgttaaagactttgaaggctaaattaagaaggtctccatgtggggtttgagggccgtcatcaagcttctgaagtttgcgtggaatattgggggtggactgggaggtgraccaaaggtttaagatagtggttccttttcagctggctgagtttaggttggtgtattttcttatgacttcagttaaacaagagagaaaaagggctggttttcgtcaggaccctgsgtgatttctgaaagtttttcatagtttactactctatgggmaccctttttgagtcctgcaaggagacacacaatcatgtggtcttgatggtggcatccagaggccccatcttgataataccagtgggggtcctgattgggaactgcctctgcgccagtaggctgggcaggagtttggtgatgaattgtatcagcctgcgcctgagctagggtccagatatggtcttagtcttctggggtgagggtggaagagaataatgtagaggtcatgccaggttagtttataagactgggtaaggtactgaaactccctaatataagaggtggggtcttctggaaatgaaccgagtcttttgttaatttgagacagatcagtgagggagaagggaacatgaactctagtaataccttcagttcctgctacttcctgaagtaagggtgggtcataggctaaagatggcatctgaaggagtatgggccggagggaaggaaaaagccggaagtggttcctgctgagggtatgaagggggaagggagttgagttgataagcagtggaggatacatacgggcgtaaggtggcaggatgggtttataggcttcaggagagggcgatgaggaaggagaatgagtacaggcaatgctagaattgtcctgatgggacggtgtaggaaaagaagtggatacagctgactgggaaggtggtggctgagaagatgatgactgagaagacaacgaacgggttaaagaaggcgattgagagaaagaggtagtggctgggaggcatggacagcagtctgctggattgaatgaggaaaaagaggtagggytgggaggagaaaggtgatctggatagcaagaatggaagagaaggatttgaacaggtaaacaagaattgtagaggtcgggctgtgatctgagtgcaaaaaacgcctggacatacagaatttctccccatttctccagtcattggcaataattgcttaagttcgttaaaattataaagtcaaatgttttatttgagggccatttagatgcattgtttaatttgtactgcatccaggctatattgtaaaaaaagacggggcacttagggtggatatcttgtctgaggcctaaggtttgcagggttcttttatgaggcagcctagagggctgttttttggaatagaggaccaagaatttcccataacggagggtaggcatgggagaacagagaaaaaggagaccgtcctggacagctggagggagacgataaaaggagtgatcgtcactgctgcctttttcgttcccggaatgggatcagttggcttagaggtgtcccctaagaacagatgatcagcaactgcctggcacacaccagagccttcttggaccaacgctggatttttggaccggagaaaccaagagaggccatgtagatttttccctgttgacagagctcccaggaaacttactggtaggtgagatcagtgactaatgtgcatgcagaggggtgactggaggctgaggagtttcctttgtctggctgctgtggcctactctctggggtggaggggtaggcccaaggaggacrcagacttgagcccctcccaggttttggcaccagaacgtaaaatttttgtattggtttgaaacccaagagcgcaacagacaagatgaggtggtgtggagcaacatgctgttttaatgagcgcctgggtgcaggtgggctgaggctgaaaatggcatcagcaccaagtgaggacgggataaaggttttatagtctcctgtaaacaggaagtgttctagtctgtcgtaactgctatgttgtacctggatggcctctttctcgatcttcaggagtatgtgtcttccaaccagggtagctatcttctggccagctctcttcctgcttctgctattttgctggtgtaccctgctgatatatgtggccttgcaccttggtactgggcctgagaagggaggagttactcatcttaaactttcaggccccaggaagaatcttacaatagtgaaaaaaaaagcattaaataaatgtttatccacttgcactcttatttagctaccagtccccacacaggaggctggacaagtctactctgttatctgcacaacctaaagagtctgacatgagggcatttcccagcacgatgggcaaatgggatcaccttacaacaaaccccatcacgtgcagaacacactgttaaaaaaaaaaatcatgagccaaactaaatttaacggagtttaattgagcaaagaacaaatcatgagtcargcagcctctcaagccagagtaggttcacagactccagcacaggcatgtggttggaagatttgtggacagagaaagtaaagtgatgtacagaaaatggaagtgaggtacagaaacagcctgattgggtacagcccagcatttaccttaatttaacatggtttgaacagttggtctcctttgattggccaaaatgtggtgattagcacaagagtaggttacagtctgcttatgcctccatttaggtaacagttcatgattttcagagaaagctttaggctggacttaaaatatgtaaggaggcaagtttaggctaaagttaatttaacaatctccctttttggtcatcttctcaattttgagagattgaccaaaactttagtcattgatgtaactatcaccatcataaatgtccttatttggtttcaaaacccaccggaaaatagcataatagtggattttgtaagataggaacaaggacttcggtaatttttttttacgggttagagtagagggtacctcctcatgctggaatatcctgtttacaggagaaaaacaaaacctagtctgttctaggatatatctgtttccttgaagtcttattttttattatgtcacatttatcataagtgactgctttttggtttggtctggtctgtggggtcctagtgcatgagctcactccaaaacagtatcctcccataattttgtttaaatctgttaaaagaaaatccttaaccaaattaaatttatccgagtataattgagcaaagaacgattgacaaattgggctgcctcccaagccataatagactcagagatactccaccgcagccacgtggtggaagaagatttatggacagaaaaaggaaagtgacatacagagaagggaagtgaggtacagaaacagccaggttgtttacagctcagcatttgccttatttgagcagggtttgaacagtttctcttctttggccaaaatgcggtgattagcactggagcaggttacagtttgtttacatctccatttaggttatagttcactatgcacagagaaacctttaagccaaacttgaaatatgtragtagatagctttaggctaaacttgattcaacaacactcatgtttattatacccaaattacaaaacttttcatgaaaatctatttttatacatccatgttgtgtggaaaattttttaaaaaaagaaaaaagaaatctgtttttagtttatgaccatatgaatatgttaacctattaaattttttttaataactttatagggggccaggcatagtggctcacacctgtagttccaacactgagaggccaaagcgagaggatcacttaagcccaggagttcaagaccagttgaggcaaaatagtgagaccccgtctctacaaaataaataaataaataaataagtaaaataaataagagaagaaagaaaaattagtggggtgtgggtggctcatacctgtagtttgagctactttttaggctgaggcaggagctcaggaggtggaggctgcaatgagccatgattgcaccattgtactccagcctgggtgacagactaagaccctgtctcaaacaaaacaaaacaaaacaaacccctcaaacctcaatagaagagttgtaaacaaaagcaaactcaagttcctaccaattattattaatcattacattatacaaatttctattggttttgtgcgactatgttgtagatcagaatatcaacttctagtttaagataacagattgagtctgagagtggtggctcatgcctgtaatcccagcactttgggaggctgaagcgggcagatcacaaggtcaggagttcgagaccagccttaccaacatggtgaaacgctgtctctactaaaaatacaaaaattagccgggcattgtggcacgtgtctgaaatcccagctactcaggaggctgaggcaggagaatcgcttgaacctgggaggtggaggttgcagtgagctgagattgtgccactgcactccagcctggtgacagagcgagactccatctcacaaaaaaaaaaaaaaaaaaaagaaaaaagaaaaagaaaagataacagattgagtacagaccgaaaattctccgttctatgacaaataccgaggagtgactgaaaaaaaaattaacaaacatatagcaacagttaaaaataagtaaatagaaatctgcatagaccagaaatttacaactattattgaagaaaagaacagtaagaaaccagaaagtagtattttgggggcagctcacgtggagtcaggctcagtgtaggacttgagtgaaagactttcccaagaagccccagggctaatctgggcagccctggatgcttaggtctggaacccagggccagaatctttgacagccagatccagtaaaggccaaaaccaagaatctcctcccacaccagtggattctsaaaacacagtgcacttgatcaggctgtcagaattacctagagcagtgcatattctgatggagagaattctctgaacaatcctgaattgcatttaaaartgtgcgaaatatttgtgtaataaatccttcgtttgtgttcatttgttagaagccaattctaaacattcaaatattctaatatgtaaacaaaaaaactggaaaaagaatttgcatttaatttgaccggagaatatgtgcttctcttagctgtgaattttttttcactttattcagtttgctttcagaacataaactgcattctaatcctgttattttgttcttaatatttatcatcctctaaagagaagttagaatgtttatatagaagccagggaagtggtaaagtgatattattcagtgagatttatttatgaagccaataaatcctgcaaaaagatgtcctttgaccatttaaaagtttacagctctattgcaacttattaaatgtccaagagccttgttgacacataaatacatgtatgacacataaagatcactgaaatttcaaacctgtcacctttcattattgttactaaggaaaaacaaaaaataagagaaagactataaatattcagtcttgtttagaaaactaaagggattaagcttattttaaatttttaaaagaaaatttgtcaaccatagctgtaggggttttctgcctgtctttgaaaaaccacacagtaatataatttatattctggcccacaagactgccgccacttcagatgccagtcaaaaatcctagaaaccacccttactttagacgcaccagctgtaaattcagggatttccacagtgccctttgcaggctccataatttgctagagcaatttcagaactttactttcactttactttatgtttgccagtttactataaagatacaactcagaaacagccaatggaagagatgcatagggcatggaaatgagggagcttccatgccttctctgagcctgccactctcttggtacttaaatgtgttcatcagcccagaacctctctgagtcttactgtttttataaagctcaatcccagccctcctctccctctgggaggtcagtgggtagagctaaaagtttcacctctactccctctgatcacttggtctttttgatgggcagccccccatagtgagatgtctctcagggccccaacttaagtcactttattagcatcaactctcctgtgatctaagggagcttgttatgaataacaaaaaatacttttaccacttggaatatccaagggttttagcagccctgtaccctgaactgagaacaaaaaccaaatatttcttgttataacacacctatgggacaaaattcatttagttttctacatttttgtctttgaatgctgcattagttaaattagatgtgtttggtcccaaaatataatgtgggatatagaagataacaattatttcttaaaatgggcaaagtgagttttgtagacctgaaacttcgtaaagaaaatatttataactttcccaaagcctcaaaccttatatgacaaatgcattgtcacattttatttgaagtcttttcagtggtctgggttgtaaatcagagttaggaagggtgtgatagctcctatggttagggagtttagagccacaggaatttaagagatttgccatgctgaatgggccctgaacccacgacctgacccgtaggtaatttagtttcctaaaccattggatccatctttatcgataaaggagcatctgtttcggtctttcagatcatactattagctccaaaattttttaacttccaaaattaaatacatattagtcagagaaatggtccttacttaagtcaaattgaaaaaatgaataaacgaggcacagtggctcacgcctgtaatcccaacactttgggaaggtaaggaaggagaatttcttgagcccaggagttcaagaccagtctgggcaacatggtgaaactccgcctctgcaagaaatacagatatacaaaaattacccaggcatggtggtacatkcctgtagtcccagctattcgaaaggctgaggtgagagagttgctggaacctgggagtttgaggctacagtgagccatgatcatgctgctgcactacatcctgggtgacagaaaaaaaaaaaaaagaaaaaaaaaaaagaaaaatgtgtaacttcactcaaatagactcttttagaatgtgtttttttgtgtgtgttcattttgtttgcaaaccccatgcagcttcccgttttgccttggttactaagaagttctgagaaaaatttgatcaagtttgaagtaacaaaaatatttaataaattctaatttgtttctcatctgcatttattgtgttgctactttctatcattcttcctcaaatagttttgtattacaatttatctgaaaccctctttggaagtaagtgtggtttaaatgatgaaataattaaaataattttgtagtaactgcagtaaagagtagcaaaggccaaatttattttttctacttgctagggttactagcarcaaatccatatgggtctgcagcaacctcggtttttgcctctttagaagaaataattcaactgaggggcgtaaggcaggagagatcaaggcaaattttagagcaggagtgaaagtttattaaaaagttttagagcaggaatgaaaagaagtaaagtatacttgaaagggccaagtgggcaacttgagagatcaagtgcatggtttgacctttgactttgggttttgtattttggcatgcttctggaggcttgtgtcccttctcccctgattcttcccttgggatgggctgtcctcatgcacattggcctggtagcacttgggaggggctgcatgtgcagtgtgtttactggagatatgtgcatactcacttgaggcattcttcccttaccagctgaatgtccctagaaggtcacataagagacattaaaaattggccattttgcctcttaatgtacatgcttgagcccactcacccaaatcctgagatattgggaaactgctgatcacgagtttcaggtttttttctatcttttgggagactgtctttccctggcactggctgcaaccaattattattttagagagacagttaacaactgcytgaccatcacctgacattcctggtgatgggaaggagatgcctgccctgctcatgtctgcctgactacctactgtaacaccaggttgtctaaatgtgccatgagcaaacagacaagttgtatattttgggtcgtgattgagtcttccaggttcttaaaaccacagcctttaatttaccataaaaaattttaaaaagaagttaccaggaggataataaaaattattatgtgtacaaattgatagtgtggatagagaagagaaagaaataatawccrtatttattcatagaagtagaaaaaattcaatttcagatgagaagaaaaactgttaatgaaacattttatagagagccaataattcttcaaaacatggaataactttcccttataattaatgtcatattatcaagatggtagaaataaaattgctgaagaatattattaatattattattaagcttacttctccytggatagataaaaatcacacagcgttagctacatgcattcaaggttataaaaatggtgtaaygtgaacataaatttgctttatgaaatccgtggctgaccctcagagaagcaataatccctggaagctatccccccacagctgcagaccctcagtcatgtaccagccacctctaaaggctgctgaaatttgttacttgaaaaatggaatgtaaagttcttggacttagcctaattacaaaccttacagccaaatccacaataacatttgcatctgcttaataaaatatacagaacattgtatggcagttatgagacccgtaatgaaccctcttatccaatggtaaacagcttggggccttgtcatccccactttgcaagagatttgaaattatgttaggattaaaaagacacagagggaagttggttaagatcctcagtctcaagtcaaatacacagagtattttctgtaaacaatgctttaaccctgaaagaacattcttattttatttttcttctacaagacttttggtcagttagttcatctctttgcacatcagtttcctcgttatgaaatgaagagaattagagtaggtaccttattgagttgctatgcatgctgaaataatacaagtcacataattagaagtgctgaaatacttaatggatccataaacattagcttgccagtctttgagaccagaatgcagttgcttgcatttaactaagttttatcttctggtaaagcaaaaatatgatgttcaataaataaataaacaaggaataaataagcagagaagcactctttggattagagcactggctcacactcatctcagaagtgatttaaatcttgacatttattgcagtgagtcatagatgatctgataaagtaamgatcctttcaaaacctgctaagctctccagaagcattttaaaaattttgccccaacataactggagctcttgatgtttccacattaattcaaaataattaggaaaaagtaaaggaatgaagaaaaacaacttgaataaactttggttaactttwaaaaaaaaaagattgttagtgaaatgatgatattgaaacatcttaggacaatattggtttcagaaatctaatttgaaccaaaaaagataggccaattaggtaaataatcttttgaaaatacagacatacctcaaagatattgtggcttggttccaggttgctgcagtaatgcaaatattgtaatcaagtgaatcacacacatttttggttaaacagtacatacaaaagttatgtttacactatactgtagtctattaagtatgcaatagcattgcatctaaaaagcaatgtggataccttaattaaaaaaatactttattgctaaataatgctarcaatcatctgaaccttcagtgagctgtaatctttttgctgatgtgggttgtcttgcctctatattaatggctgctgaccaattgggatggtgttacctgaatgctggagtggctgtggcaatttcttaaaataagatagcaatcacgtttgccatgttaattgagtcttcctttcatggaakaaatctctgtagcttgtgatgctatttgatagtattttactcacagtagaactttcaaaatttgaagcaatcctctgaaatcctgccactgctttatcaattaagttaatgaaacattttaatcctttgttgtcatttcaacaatgttcacagcatcttcaccatcttcaaaatcttaaccatttttctttgcactttcgtaagaggcaacccctcatctgttgaagttttattatgagattgcaacaattcagtcacatcttcaggctccacttctaattctagttctcttgctattccactacatctgcaattatttcctccacctgaagccttgagcctatcagtcatccatgagggttggaataaacttccccagttcctgttcatgttgatattttgacctcctcccaataatcatgaatgttcttagtggcatctagaatggtagatcctttccagaaggttttcaactgactttgcasagatccatcagagggatcactatctgtgkcracaatatcctcacaaaatgctttttttaattgtatttaattttttttttttttggaaaagcagtctctatygctcaggctggagtgccgtggcacaatctcggctcactgcaacctctgcctcccaggttcaagtgattctcctgactcaaactcccaagtagctgggattacaggcatgcaccaccatccctggctaatttttataattttagtagaggtggggtttcaccatgttgaccaggctggtcccgaactcctgaccttgggtgatccacccactttggcctcccaaagtgctaggattacaggcataagccaccccacacytggccttttttccaaatttttaactttaatttttgtattttgttttttatttttattttttatttttgagacagagtcttgctctgtcacacaggctggaatacagtggtgcaatcagctcactacagccttgatttcctgggctctggcaattctctggcctcagcttcccccgagtacctgggaccacaggtacaagcgaccatgcctggctactttttgtatcattggtaaaaatggggtttcaccattttgctcaggctggtctcaaactcctgagctcatccaatccacmtgcctaggcctcccaaagtgctgggattaccctgcccggctgccaaattttattcttaaagaatactacttgaaagtcaaaattactccatgatccatggactgcagaatggatattgtgttagcaaacttgaaaagtttaatatccttgtacatctccatcagagctcttgggcgactatgtgcattgtcaataagcactaaatgttttgaaaatatttytttttctgagcattaggtctcaacagtgagcttaacatagtcagcaaaccatgctgtaaataggtgggctgttgtccaggctttgtcgtttcacttataaagcacaggaagagtagattaagcataattcttaagagccctattattttttgaatgstaaataaatattggcctaaacttaaagtcattagctaygttaatcctgaataagattctgcctgtcccttgaaggtttgtagctgagacctcctttctagccataaagtcctagatagcatcttcttccaatagaggactcattcatctacactgaaaatccgttgtttagtgaagcctgcatcaatgatcttagcttgattttctgggtaacttgctgcagattctccatcagcacttaactgtttcaccttgtactttttgtatttcaaatagccaacttgagacaagtttattagtaatttcatggtacccttttgtgggctgattctcacctcacccttccccaagcaactcctgtgactaatgtcaaacaatatgtccttttgttgcttttttcagccacccttacagacccccaacacmatcaacctggaaatgacctcagtatgtgtaatcttaagtcatcttgctaacgcagacacctctgaggttcccaagaaaacttcagtggagttctctaaactgaaaccttgagagaggaagattttcaagtaggaaccagacaaattcacttaaaactcaccactacacacctgtgtcatagaagcattccattttttctattgcagatgggatttcctcttcaagcttactgtactgtgtctttttaaaaaatagttgaagacatcggaataaaagctaatgtcccaaacagcgyttccctggatattgctgtttctttaaaagcctttttcccagctcttctgagatggtccatgacattgcctttcttgctcattaccttgatcccttgaatgggcccaaaactttggaatgcaaaaacattcattccattgacttggttgagaaagatgataggtcaggttttttttcatctaaagattatcctgggcatacttcatttgggcccaaatgagggattattccaaagaagattgaagaagcaattactccttcccctagtaatatactctttggcaatgattacagtttgcatttctgctgataatgctgtgtgctataattatatgtaagtttataagaaacctggggtaaaaccrtggactttctcccttttgctggcatcatctacagaaataccatgggcatcatgaaargcagtatagctataggctgaaaaaagcagggttcagtttgctgctgtcatgatgccctgttgagagactgctcttcaaagtttcttgtatcattgggtcctccaagtcaggcctgggtgcctctttatttacaaagagtagttgcctctattttctcaattgaaatgaccagatttttaagatctaataattgtgtccaccgaagaaatcatcaataaaaggatctgcatttcatgatacacaagtgcacctggaccctatgcagggagtggcactgctgcaccctggtcactgcctggctcctatgctatgtactcctcttcctgggacctatgtccaccttgaacttctaagtttctttccttaaaccttatgagccaayctgtgctagtttcacacttttcttttacatcttcctcacctctgtcaggcttcaaagaattgaagagaattggggccttgctctggtttaggctttggcttaatggaatgttggggctggtttgatcatctgaccagatcactcaaactttctccatatcagcaataaagcttgtattagtctgtttttagccactgatgaagacatacccaagactgggcaatttacaaaggaaagaagtttaatggagaactcatagttgcacatagctggggaagcctcatgacagtggcagaaggtaaggaggagagagtcacatcttatgtggatggcgacaggcaaagagatagcttgtgtagggaaactccccttttttaaaccatcagatctcatgagacttatttactatcaggaggacagcacaggaaagacctgccctcttgattcaattacttcccaccaggtycctcccacaacatgtgggaattcaagatgagattcgggtggggacacaaccaaaccatatcattccacctttggcccctcccaaatctcatgtcytcacatttcaaaaccagtcatgcctttccaacagtcccccaaagtcttaactcattccagcattaactcaaaagtccacagtccaaagtctcatctgagacaaggaaggtcccttctgcctatgatcctgtaagataaatggcaagttaattattccttaaatacaatggaggtacaggcactgggtaaatacagctgttcaaaatgggagaaattggccaaaacaaaggggctacaggccccatgcaagtccaaaatccagtggggcagtcaaatcttaaagctctgaaatgatctttgattccatgtctcgcatctgggtcatgctatgcaagaggtgggttcccatgtggtcttgggcagctccacccctgtggctttgcagggtacagcctcactcccagctgccttcatgggctggtgttgagtatctgtggcttttctgggcgcatggtgcaagctgtcagtggatctaccactctggggactggaggacagtggccctcttctcacagctccactaggtggtgtcccagtaggtacactgtgtgggggctgccaccccacatttcccttctgcactgccctagcagaggttctccatgaggatcccacctctacagcaaacttctgcctggacatccaggcatttccatacatcttctgaaatctaggcagaggtgcccaaaccttgacttctgtgcactcacaagctcaacaccatgtggaagctgccaaggcttgaggcttgcaccctttgaagccacagactgagctgtaccttggcccctttcatccatggctggagtggctgggactcagggcaccaagtccctagtctgcacactgcaggtgggctctgggtcccacccatgaaaccactttttcctcctagccctctgggcttgtgatgggaggagctgccatgaagacctctgacatgccctggagacattttccccattgtcttggggattaacattctgctcctcgttacttatgcaaatttctgcagctaccttgaatttcttctcagaaatttggattttcttttcatcgtgttgtcaggctgcaaattttccacactcttatgctctgtttctcttttcaaatggaatgcctttaacagtacccaagtcacatcttgaatgctttgctgcttagaagtttcttctgccagataccctaaataatccctctcaagttcaaagttccrtaaatttctagggcaggggcagaatgtcgccagtctctttgctaaaacataacaagagtcacctttgctccagttcccaacaagttcctcatctccatctgagactacctcagcctggatttcattgtccatatcattatcagcattttggtcaaagccatttgacaagtttctaggaagttccaaactttcccacattttcctgtcttgttgtgaaccctccaaaccattccaacctctgcatgttacccagttccaaagttgcttccacatttttggatatcttttcagcaatgtcccattctgctggtactaatttactgtattagtctgttttcatgctgctgataaagacatacctgagactgggcaawttacaaatgaaagaggtttaccagagaactcacagttccacctggctggggaagcctcacartcatggcagaaggcaaggaggagcaaatcacatcttacatggatggcaggaggcaaggagagagcttgtgtagggaaactcccatttttaaaaccatcagatctcatgagacttattcactatcaggaggacagcacaggaaaaacctgcccccatgattacgtcccgccaggtccctcccacaatacatgggaattcaagatgagatttgagtggggacacagccaaaccatatgaaggctgttggtctttcttattgttgtgttcactgaagtagcaattttaacttctttcaagaacattttctttatatttacaacttggctgtttggcacaagagacctagctttcagcctacctcagcttttgacatgtctgcctcactaagcttaatcatgtccagcttttgatttaaagtgacaggcatrtgacacttcctttcacttgaacacctaaaggccattgtagggttattgattggcttattttcaatgttgagtctcagggaacagggaggctggagaagtgggagagaaatgggggaagggctgatcagtggagcagtcagaacacacaacatttattgattaagttctctgtcttatatgaatgtggtttgtagcatgccaaaataattacagtattaacatcaaagatcattgatcacggaaataataataaagtttgaaatattgcaagaattatcaaaatgtgatacagagacatgaggtgagcacattcttttggaaaaatggcactgataagatcagttgatggagggttgccacagacctacagtttgtttaacaaacaaacaaacaaacaaaaggccaggtgtggtggcctatgcctgtaatcccttcagcactttgggaggccaaggcaggaagatagcctaagctcaggagtttgagaccagcctggacatggtaaaaccctgtctctaccaaaaatacaaaaaattagctggatgtcatgtaacagaggtagaaggattgtttgaccttgggaggcagagtttgcagtgagctgtgatcatgcctctgtactccaacctgagtgacaaaataagacaaaaracaatgaagtgaagagcaatgaaacaaagtatgcctgtacactaaaaatcagtctgttgtagctatttgatgttaagaacactaaattctttagtgcctttaggtcatatttgtagtaaacacttctgttaatgttttgaaactttactatttgcaccacccccagttataagtgtacacattcttgcatgttggactaaccctgtccttggacaaaggtcagtagcagatgaagattgcattttgtgatgtgctcagttaagtttaatttaaagtggtccattgtacaataatgtttgtatatgtgtacagaaaaattgttcaaatcaggaagggattatttacaaagaattggcccaagtgtgaggaggccattgaaagtgaaatgagggaagctctataccaagtgtaagtgtagtttaattctgcccagcacatctggaggggaacatgtgtgtaggtgcatcacattcccaagccagaaaaattttaggtgattcaaaatgaacactgtattgtttggagaaccaaaatgtccaggaatctgtatcgtgttttgtttgtttgttttgttttttgagacagaatctccctctgtcaccctggctggagtgcactgctacctctcctgacccgccaccttccccaggctcaagcgattctccaactcagccttccaagtagctgggaacacaggcatgcaccaccacatccagctgttttttgtatttttagtagagacagggtctcaccatgttgcccaggctggtcttgaactcctgagctcaaaccatccacctatcttggcctctcaaagtgttgggattagagatataaaaccatcatgcccagcctatatccaaattttctttttatttgtttttgtttgtttgtttgttttcttatttctttctttgtttttgtttttgcttttttttagatgcaggttccactctgtcacccaggctagagtgtggagtgcactggtgcaatttatagttcactggaacctcaagcactcttcctgtctcagcctccagagtagctggaactataggagcatgccactacacctgactaatttttaaaaactgtttgcagagacagaatctcactatgttgcccaggcccatcttgaacacttgggttcaagcattcctcctgcctcagcctaccattatatccattttaatcagaatataatatttaagcaaaaatggaatgtctgagcttctacagaaagcctcctttttcctgcctcttccatttcttgattttatttgtgataattattttttcttttattttctcctcactttattctttaaaatgcttctctttccactaattctgtatttttcttcatattactttttctttcctccttccactcaccctgccattttttttaaataaatggttttccaaatagatgtgtgcaaataacagggagtcaagagtaagatcaagttactttagatagtgtttgttttagaaatagcagtaaaaattcactctataattgttctgtggtcgacaggtttatgcaaacctatcccccaaaccggaggaagctgaaaggcccaagtaagagactgataaatccagtttctcagaaagaaacatttaatagggagtgagaaacagaagtcatgatgtcctggcaattgacaacaacaagattagatagtgaatccccccgtaccattacccaccgcgtatgacttatatgtaaaacatagggaaggattatgtggaacaattgaagtcaacctctcagggaamggcaagaatgctatgtgaatctgcctaagggcaggatttatggtagcagcagttaaaatagaaatcttaaagrcattcccagaataagggttacccagaagtcaacatggcagattaacacccaatatrgagttgctttagcctccacaataatgtagggaaataaatataatgaagatggcagtattttttaaaccatatttcaaagaaatcttctctttgaaacatggagaagaaggcatatgtcactatatgcaacataagcttatattcatatctatttagtatatccaggacaaattttatttagttctaggaatatacagtgagatttttcttactgccccttgacgttagatattattcaccttacagtgatcagagatacrtcttttagcatccaccacttgttcatcaaccttgtctgtcaaatggagaaatctatgtggcaaatgcaacaagaagttttccttgacccaataaagatacaggtccttccttaaatggctatgttgaaatataaattcttaaattatatacttatttacatggcttctcccctctagtgaacttatcctggaatctgtcaattagatttattctatgtactgtctattcttttaaaatgggactctctcagaaatatccctctggataaggtacacatctcatttttctcagtgacagtaaaggggcgtaatttctattacacaggtctaattgccttgaagaaacatcataaggactcaaaacatggaaggtattattattgttgtgattatgctttgaattcttaagtaaccaatgtattctctgtctctggatctgtttctagtgtcaaaacccttgttagcaggaattagatcagattatattaataattatgtagtggatatcttacttttgcatattttctcatcagacaatacacgtctatattatcttttatctcagtgtgtatgaataaatgtcagagctatttgggtcataatttgctatgcggctgttttgtcttgttatatatttcactgtaataacagtgagttatgattcacaaagtttgcctccttttataaaaggtgtattttaatttgatgttagaaacaacgaactttaaaaatgtaattggccttaatatctttttagattcctttgaagatatacttascacaaaaatatgctccttgggaatttgacaattgagctgataataggatatatcatttttagtttacaggcaaaagcaaatgcttcattattttgttgttatttactacatcataaaagaaatttaattttagctagctgtgtgcatctaagtccagatatcatttgataaaatgagtcaagtgggaaaacttccatttctttgtgatgacacatcaaatatgcccttatctctaaagacattaagaatgattgagtgaagtcttcctactttgttttttcagtatctttagacatagtacaaacatctaaattacgatatgtttattttacaggagccaatgagaaagaaatagccctaatgaatgctttgactgtaaatttacatcttctaatggtaagttttctttcccactaatgtttagaacacattcatttacagaatctgatgtttttctatctttaattcatgagcttctgggggtttacttatttaaaaataaattgtgaggttattttcatttttactaggaaatgctggaccatgatataatagcttcttcctaatcatggaagagttgactcttgagaagagctttagaataatgaacagttcttgtctgggaaaataaagaataagagccataatgggtaaataggcaaactacatgcaagcctacaaaacagtgatgtacaatgctagcaaagcactgacctttttggaaagacaattttctaatggcttcagcagagtgagttagtggatcagtatacttttgtrtattaatataggttaaaaaagacttggagtattaaatttttaaaaagaggtctagtaccttaaatgagttaatgtgtttaaagtacttcttacatcttactcaataaacagttttaccttaaagtgtcaaatctattatctattagggatattgtgttaatggtgactgcccaatgctttaaagaatcttgacttcattttttcaagtatgttttggaaacatgtctacaagttcagatatccctggatttgactcccagctaaattacataatgcttatttgaggttgaaaaaggcttttggcatctctaagtcttagtattttcctttgtaaaaatgagaaacataatatctacctcaaagatctgcatgagaattaaatgtaataatatgtgaaaattgctttagtaccctggccagtgatcaacactcagttaacagtagctatcatcttcgttgttattgttgtcaatatcactctctaggaactgtgtggagaaatgaaagagcttcactgaacaaatgagctactatcaatacaaataagacatacatagaccataatatttcagtgtcatgccatcaaaattaccatgaaatgctttgggaagataatttgtcaattaacagctttttttgttgttaatcatcagactttaagtttcatcaattaatatataagtaaagtttgaggattcgttatcacattcacattttcccccgagtttgctgtttcattgataagcaaattgagccaatatcttctttctctttgagattcactggaaacatggctaattgaaaaggtagtcctgacaaacacttaagatgttgagttaattaatgtctttaaaatactggagattataaaatgawagtgtgacatawwatgaacaaatgtataaattgtgtattaatgctttctcaataaatccattttattgcagttatcattttttaagcctacgccaaaacgatataaaattcttctagaagccaaagccttcccttctgatcatgtaaggacttcttcaaattgtatttatgttctttctactcttcctagagcagtgtatcatttgcctgacttgaatgtttactcactaggcttttccaagcaatcttacaataaaaagatctgtcaaatgcttttgattaaattttttaatagattatagctttatttcttttgttaaagtaaaacacgtgttaagggaagagaagayggaataggaacattgatttattagtctttttaaagacattgagcaaaccactgctctaaatcaagtgcagttataaatgttttattaattcttattgctcttttattttatgaaatcaaatcaatacaaaccccagtgcttaaccctttagctaaatagaataggaatataaacttttatttgtccagtgtgttttcatagcatgctagcataaatgttggcccattattatcaaaatattatttattagagattaaaaatatttcttgtgatttactaaaaaaagtcacattactttacttgatgatgagwtgtttattcttacttgataagaaatgtaatggtttcagacacaaacacaaataaaagtacaatgtaagtctgggcacagtggctcactcctgctatctcaacacttcaggaaaccaaggcaggaggaacacttgagcccaggagtctgagaacagcctgggcaatatagtgagacctcgtctctataaartaaataataaataaatwaattaattaattttaaaagtacattttatattttagttttggtgttagagaaactttatttctctatattattgctgtcttttaytctagcccttgtaattttagggcaagtaattatgtcaaatggaataaaaccctaatatcttactaaaatggatcaaaatcctaatatctacaaaagattccaggtcggtgtgggggcttatccacatgcatatctggtactcttaatgaagtaaacttcttaatgccttttttttagctaacttactcttcctagggtaagccatttctatatcctatgttcaaggatgacaagtccctactattcattttgcttattttgcaaattctggttttgacttagattagatgatttaatttcttattctaaaatctcttataattccwtaagtcaaggagatccctctgttttcatctatctcaaagaatgttcagaattctatatgtgaattttattaagtggttcttctctgttgtgtattttgtttaggtgttttaaccttcaccttggatttaatataataatatgcccttatttttactttattatttgttatttcartgtacttctgtgctctcagcttgatttgataaatacatcatctttcctttttagtatgctattgagtcacaactacaacttcacggacttaacattgaagaaagtatgcrgatgataaagccaagagaggtatatgagaaagaaagaaatatttgtcatgctttgtttagtattgatttttttcttcattttcctcaaaagtttattaaaatcttcattactttaatggaactttcaagaaagcatgaaggacctatacttctgttactattagatcattttgcttaaaatagagaataactyagatgtgtatttattttcatttttcaagggctagccatatggcaagcaaactatttttctgttaataccactggattctgccatattcttcaatgggatgggaaaagggtgacaaatttagtatatcattttcaattccaaatgtcatgcccatgggtgccattaaaatcatgctaaagaccagaattatttgttaaaatggaatcgtgactatatttcatgtcccctcttactctaagtatcaaacattttctttgtgtttagactaggatagtggagaaagggatgtggtataatgggaagagctttggctttacagtctggctaatatttccagtgaaatctcagactctccagtttactgggtatgtgactttgggaaagttactttattctctgagactcctttatatttaaacagataacaaaagcatgtgtctaatcaggcttgacctaagatctaaatgtgtactttacattaatagagataaaaggctcacagactttgacatttaaaccctgcagcttgtgtaatttgtcactagtcgaatcatacagaataaattttaggtttcacataagatgctcccagrccgctagtcattgtttggacaattacttctttcaacccagaattactttgaataaattaaagatgtactctattcacttccatttgccaacatacaataaattaatggaataaaaagttctcacatgagaggatataaattgagaggatataaattgttaatttctagcaaaaatgaacatagctgctaataatcacataagtgaccaatattgtggagtttcatgagttactcataatcttgggaccactgttgagcattacctagaacaagtcaacatgagagagggccgtatcctgtcgttgaaaaatgtatttcttatgtgcttaatactgattttttaagatataaattaagtattagtatctataatattttccttaccactttattggaaattatggtgggtaaaccttattagattgttttaagaataaagagttttggattgccaagttatcaattttacttacaattaatgacattcttttctttatataaagtrtacttcacttaataattcagatattttaataacaatcccattaatattgggatgccaatttttattgatgcccattttgtaaacaaattcctggtttcttctagtagagagtttatttcacacccacacacatacacactcacacacacacacacgtactctcttaacatggagcagagtamttggcaaataccaagataattaaaaattaaaagtaaactataggataatatcttaatgagcttcccccaaatattaacgtaattaatgatgcattgacctcaaaatcatgtcagacagcactggagaaaattcatggctgggtgcagtggctcacgcctgtaatcccagcactttgagagtttgagacaggcagatcacgtgaggccgggagttcaagaccagcctgaccaacatggagaaaccccatctctattaaaaatacaaaattagccagatgtggtggcacatgcctgtaatcccagctactcaggaggctgaggcaggagaatcacttgaaccygggaggtggaggttgtggtgagccaagatcgcaccattgcactccagcctgggcaacaagagtgaagctccgtctcaaaaaaaaaaaaaaattatgaaaacttcagrattgctaggatacaggatacacataggtactttgtatttaactaatttttttcagctcaagttgtttgcaagaccaaatctaaattcattcacaacctttagtaagtaatcaattattagttgtagtggcaagatataaggaaaaaaaccctctattatagtcagttttattgatatttttcttcttgtttgggtcttgagctttagattagtttggaggagattttaatcttaatctaatagaagatattggctaggtaaaactcagataaaagatgtgtaagtgttatgttttctttggtttagtttaatttagtttagtttttttctgagacagagttgctctgtcacccaggctggagtgcagtggcactattctcgtgcttccgccacccaagtagctgggattacgggcatgcaccaccacacctagctaatttttgtatttttaataaagactgagtttcaccatgttggccaagctggtctcaaactccttacctcaagtgatctgcccaccttggcatcccaaagtgccaggattacaggcgtgagccacacacccggcatgttttctttttttggaaamaataacaggatatcagattgataaatgcaataccaatttctgataatttatcttgctatataatacttcatggacttcttgcactttgtggtgttttattagtcaggaataaggagaaaacaacttatagctgtggaaagagtacaaattaatttttaaaaactggagaataaatcaagcaattcggcttttgaagactttcacttgaaaaaacactttttactttttaattatcatttcttaataataaaaattatgctcaaatgctgctcttatgccagatttttaaagaaccttaatctgaaaaaaaaaactattttataatgcaaaagggctcacggtgaaatttagatcggcaatatgaaattacaaatttattattatcgatatsacctaacttgtgcctaacttgatttagggggaagaaaccttaagaatagaggatatccttgaagtaattgagaaggaaggagactcaattgcagtgatcctgttcagtggggtgcatttttacactggacagcactttaatattcctgccatcacaaaagctggacaagcgaaggtatgcacgccatttacttcttcccaccttactccaaacatcactctacttaagagtgttctaattgcatgacttgtgaagtactttagcttgtgtctgagtaaaactatttcaaaagttaaaaaaaaaaaaaaagagtaaaccttgggccaggcacggtggctcacgcctgtaatcccagcacttgggaggctggagcagggggatcacgaggtcaggagtttgagaccagcctgacaaaaatggygaaaccccatctctactgaaaatacaaaaattagctgggcatggtggtgggcacctgtaatcccagctattcgggaggctgaggcagaagagtcacttgaactcgggcggtggagattgcagtgagccaagatcgtgcccctgcactccagcctgggcaacagagcaagactccatctcaaaaaaaaaaaagcgagtaaatcttacatttttaaaagaaaatctgtaatcttttttgcttcaggcatctctatttaaactgcttttttttttttttttttttttttgccacttctgtggtctcacctccttagtagcagctgctctgtgcatttgcctctagtcagcaggccaggcaagctgtaggtgatgccattggtactcagctggtcagtcaccaggaagcagacaaaatacttaagataggaagtacatgctaggtctattaaaaattcaactcatactttgtcatactataaatcactctataaatgagttttcacttaatgctgagtatctaaagatgaagaaatgcagaattcaattttatcagtagatcaaattttatacaagttactttaaggaggccattttattcctaagactcttgaaaattttttatactgcctgtaatgagagctttttttcctacccactactaaatcacagttaaattgttttgaagtcatgtctctttgtatgtaagtgtttgtaaaaagtgtttttagtatttatttgaaaaaaaagggcaacattcaacagtcacaatttgtgyttaaaatctttaaatagcacttctatttcattcagcaatcaagccatgtatttaaaaatgtgacaattgaattttattctgaacattaataagttatgggattaatatacatgtgagatctagttaatatattcagttattgaagctaatgaatggaactaattaaaatatatttagcactgttatcagcagtctctaggaatttctaacaacgacttccaactgctttgacggataactctgaaagtggtgcattacaaaagatataaagataatgtcttcttaatttagatgttaaatgttaagcaccaaaataaagggaggccaataaaaaatcatattttaaaatgttatgcaagtaatcagcagtccctgcttccttagtatacacgtatgtctcattaaccttcctagayatgagacagcaagatacagaagaaagaccatgggtttccatcacacaatctgaggttcaaatcttggctaggtcatttaattgttacacaatcttgagcaagttacttgacatctcgctttaaaagtgctaatttaacataacagcacccrccttacaggttcagtgtgagaatgatgaatataaaacaccaaatggattggcacacattctgctattaaatgatggtttccttacctttctactcttctcaattaatatgatattataaagtggttgagagacactttcttttgtttcccattgaaacacaaaataaatttgtttactttaggttttataagtaaatctcatacttaagtactttgattgctaaagccatttgttaaatgttttgcaggttttctttaacttaaaaaatatagtaaatgcctaccaagttagtctcatagaactctcagtcaaataaatgaaggtaggaatgagcagctttaagtgtaactatgaagaagcaatcaatactatgggaatcaaatggggatatagcagatgtagatttatccattatcamgattattctaacaaatttttaccctcttgctgtagttcctcctattatcaaccaaggtgaggcaaagttctttgaaatgtagacttcgataggtctctctggtggtctggtcatctgtgaataaaactgaagagagaggcagagaagaaattaaaggtgtcaatcaagaaagagataggaaattctaagaacaaagggcatgacacagtcactggtagatttggacatgtgaggcaaaaaaacgttttcagaaataaagcatggtgggaatacaaaatgatggtgggatggagcaatgagagtcaatcaggaggttctgaggtaaaatcttcatagtcatgtgataaggaagaagaaacagaaattgtgaaaaatattttaatttaagaaatgtatgtataccaaaaacagcatgaatcataagcaaatagcttcatgagttattttgaggccttataaccatcaccccatcaagaaaaaaaaagtatttccaatactcagaatcctcaatcgtgtcttcttccaaatactacctgttaccttctgtctctgtccacttgggctgctrtaacaaaataccttaaactgggtaatttaaaaacaacataaatatattgctcacagttctggaggctgggaagtgcaagatcaagatgccagcagacttggtgtctgcttagggctgctgtttgtttcacagatgacgccttgttgctttgcccttcctcacatggcagaagggctaagggagctttctagagcctctaatacaaagggacaaattccattcatgaggaatcacttaatcatgacttaatcatttccaaagccctgacctcctaatactgtcacattgggtataaggttgtgacatataaaattggggtctggggagaccaacatttagaccrtagcatccccctttcaaatttataattcccctaacttctaaccacatagtcagctttgtccattttgaactttatataaatgcattattttgtctagttttgaactttatatgaaggtatayacaggttgaatattccttacctgaaatacttgggaccagaagtattttggatatttttggattttggaatatttgcattatacttactgcttgaacacaccaaatctggaamtctcaagtgctccaatgaaatttttattctttgagcattctgtcagtgttcaaaaagttttggattttggagcctttcagatttctgaatttgggattttagatgctcatcttttataaagtttttttttgtgtttggcttatttgctacttttatatgtgtgagattcattcatgcagtacctagcagtacttttgtttgttttttttttctatttcagtgtatttttacatagtatgaaatagatcacaggttttttccgttttatttagggtagatatttggattttattttcatttgaraactactaatataataatacatgctactctaaatattcacataaattttggggggtatacattcatatacatttctgttaagtatatacctagaattagaattcctgaaccataaggtatttgtatatttatttctaatcaataatgccaatcctccaaaaaagttgttcttctaccagcatatattagactttctgtttctctacagcttcamcaatagttactgttttcagtctttataattttagctgttctaagtagtttgcagtggtaatgcgtggcagttttattttgcagttccctgattattgataagattgagaatcttccaaatacttgttgattttctatatatcttttatgaaatgcttgttcaagtgtcttgcccatatttctatatggttagctttcttttcctggtttgattgtaggtggtatagaaattgattttgaaggagagagaaaatacaagatttcaagtggtcatcaaagaagaaaactaattaataaaaagaacaattgataatatgactttgattcacacaatagatttaagatactgaggcttttcttaactgaggaggcctgagattgtagcaagtgggggaggccaaggaaaacaggttagagagctcaataacaagggaaggccagcatgtggcaagagacatcagtttgaagatgcttcttcaagatgaagatgtgccaacccatctttttggagctctgtcttacttccatgtttctatatttttcatattctgttacttgtttctactaggaacttctttcctacacccactaattgtagatgtttctgattgtcccctgcattgtatctctagtgatttttaaccactgccataattcagctaccactgtcaagtgcagactccaggctactcatacaataggaaatagcctgcatcttcccactacatccggatgtcctatatgtaccttgggatcaatatgctccaaagagatttgtgtcatccacaagatgtctctactgtatcatcatgtcaccatctttctggaccagtacrctcagcttttctgttcttgacctttttaacctatctcttattaatttcatcctttcagggtctgtctttcttttaatatttctgaatcaaagatgaatgttttcagctacaagaaacaaatgttaaccttgggtgaaaaatgcagatttctttttctcaccacgaaagacttgaggcaaggggctgctggggtccactcagcaactcaattatgtctgagtgccatctcccaagtttccttagagttttctcagactttttccatcacagtcacaagatatttgtctcaaatccagaaatctcatttctatttaaggcagagagaaggaagaagggagaagcagcagggcagcttcatctgtttctttcatcctaagtgctaaatctttcccagaaaaaaacctagcagattcctgctaatgactcactgcttcctgaaatggcagctaagaaagagcatgagtaaggaaatatttcacatctatggccctaaagtagagagagactaagaggaaggggttgggaatgggcttcgggttggctaaatataatatttcttatgttcctcaattataccctcataggatctcattgttcctaacccattttcctctttcstctttcattgctcctttttcctttttttctatccctttattcttccccctcgctctcctttctttttgttctctcccttgctctctctctttcttttttcttttatcgtctcatttcacaaagcatttgaaacaattcatggaaaattgacaaggtgaaaataagatataaagcaagaggaatcaagactgtatgcctaaatcatcttgaggtatgaatagactttcccacaaatttagattataataagaaataggaaataaataatgaaaaatattttaataagaactcttgatgtgttaggtagaatagttattggttataaataaatacagtcacaaatgtcttcacagtgatagatgtttatattttactcatgcatcgggcaggaattaactttctctccatccattaattcaggtttccaaaagattcatggttgtgtcctttggcttttgtgtccacagcctctgtctggattcagtcaaaggaatgcacactaacttctttaaagtcttagcttagaaatggcaacatttacttccacttatattccattgactaacactcagtccatgaccttttctgggaaatgaagtatcactgcatgctcaagaacagctgttagttttgctacacctggaactagttattgtgtgttcctgatggaataggatacttattctaagatgcagtatggcattttcattaacagaatgtgtagatcaggaagacacagtcagacctggacttgactctaggtctctacattacttttcagcatagttttaattcatttactaatgtgagttattttgtccatttaacaaattaggaaaataatcgtgccaacttcacaggtttgttctaaagagaatgaaaaggtatacattttaaaaatacttagtgcttagcagatggtaagcactcaataaatgttagcagttgtcaacatgttaagaaaaaaaattggactatccaggcttgttggaaaaagaaataatgaagaaatgagattttttaggcagaaagtgaaatatccagaattttttattaaagactgtcactgaatagttccacactagaattaaaaaaaaaaagaaaagaataatctaagcagtttggccaggactcaagagactaaactgaagttttaaaaagttaagagatggaacttacaaaaattttaatagtcttatttttaaaaaactcagcacaaactctttgtactcctccatccctttctaatttcatctaaagtggcttaaagcacatggaaacttaaatgggacctagttgttaggaagagccaaataagtatttgttgaatgaatgaatgaatgaatgaatgattcccttaatttctcacatcttttacacattttagtgtacctaatggatgctggcatatttgttttttttcagcttactaaaagttgaatgcaaatggtggttaaaaagaagaccaaattctgcaaactccaacattgttttattagcttctacttctttgtgtgccatatgatgctttgtttgggtgcaaacgtctcacatctcttagactcaatcataagctgtttaaattattaaaaaataataatcacaatgatagcccaggcagtttgaataaaaatgaattacttctggatccagaataatttaaggcaaaaatcagaaatacgaataaagacatcattaataaaatcatttagtaaaatcacaggtacccaaaccacatttaaatatgaatatccacctcagtgaaccttctatttatcttcagatagtcctaattattttttaaaaacaattttgagtttattttagaacacaccattgagtgatcaagcctcaaatttstacagaaagcttggccgtgatgcttttagtcctgaaaattggaaatcaactgtcgtaatattataatagaataatatctctgtaatatctctattacagtagaatgatatcaataatacatgggatatcagaacttgagcaattaattagctagaataaatgagtactaaacacttttgtgtacaaatataaattagcataatgtatgaaatttttatccataaaaattaacctctttcataaaagtttaatactggaatgttaaataagtcatctttaccagaaattgttgacattagagacattttgctattgtcactggccattcaccgaataggatcttagtgtataagaagaatcctgtcgctattgtttctatagtagaaccatagaatagcatgcatttggatcttttatcagtacatatttggtcagtaaattataataaaggagttgcaaatagaaacacctaacttaacctggattgtcagggtgagaccttcttaaagaagatgagatctgagccaattatagaatatgggtagaagttatcaggtaaaatcccttctagaaagttaaaaatattggtaggattgcagggaagcaagtatttcagtgtaatttgtgtaattttagaaaagggaggacaagtctataaagcagaccaaaggccaactaaagaaggtcccactaagccatttagctttgccctgaagacccatggaaagccattgaaaggttttagccattcaaagagccatatttatattaattttacaaagaaatatcctgcatatggtgatgagaatagattggaatgaaatacaggtggacgaaaagaggcaattgcagtatctttgcaagaatttgaaaactctctgttgcgtgggcgccgtagctcacgcctgtagtcccagcactttggaagcctgaagcaagtggattgcgtgagcctaggagttcgagaccagcctgagcaacatgttgaaacatcgcctatataaaaaattaaaatayagctgggtgtgattgtgtgtgcctgtagtcccagctactcaggaggctgaggtgggagtatcacttgagctcaggaggtggaggctgcaatgaaccaagatcayaccattgcactccagcctgctggacagagtgagactctgtctctaaataaataaataaataaataaatatgctctgtcattatgatacagttcaaaagatgaaggtatgaaaggacagatccatttcatgcacacaattttttttatctcaggggaaatcatttttattcatcctcattccctcagtgacaataaaaacaggttacgtataagcatcagaaataaagtatctgtactgaactcctgtagtttaactcacctttggttctattcacagaattcaagaaaaagacatgttaaatacacacaaacacacacatatatatatttgtaaatatttttgggtatgcttatatacgtgtatatgtacgtgtatatatatacttgacacattttcagggtgatagaagatatactatatctgcttatgaaaaatgttgattaaggaatttacacctgtattttgatgtaggggaaaatgacataaagcttagatgcaatgttccattagctaattggtctttactcttcactttggaaatagtggaagattgttttgttcagacagatagtgaacaatctgtagtcttaaatccatgcaggtggaagcctaaaatatgtcaaataagtcaaaatatgttggtgaggatcagtgcccaagaatctgaaaattttgagctgtttctaagaagtcttcatcaggtgtttaatttaagcttttgattaaatagaccatttgagaaataatgattaattctcaatggaaatgaagcctggcctccagatgttgttataggattacagatctgggaaaagcaagcctcctggttgtcaatcaggatctctgcttctgcagccacccttatcaaagccatgagggatatctatttctcctgaattagcctcattcattggcataacagctaaacctagggcctcccgaaggaagtgttacacttaagttttttgtagatgatagatgtttcataaaatacttaagttgcctaaagcccagagtatattcttgaatattccatttttcatgcctcttgactaaccaaggaaggcagatttaagtctttgttaaactgaaaaatgaaagtgttccaatgtgaaatgtacacatcagttmtaatttattctaccctccataaaagtggaaaaggaaggctatgtctcatggcaataaaaatggaattccaaaagatctttgggcagaaaaaaaattcccaataaaatatgagagatttcttccacaccattctctgaaattcacttctttcatcagttaaattatttatacaaacaagattagggatgtcaacatgaaaggttagtcgatttgaagagaaaatattttcgcagcagataatctatcttatggaggagggtggtgagcaaagaagataatcatcatattgtctataaaacctggcatcaaaggaagcaatttagaagcagtgtcttcgagaattgtcccatagtgtctatgcaatattatcaaattcagtatgtaaataaatattttaaaataaagtaaatttggttgaggaataggccattcatgttgacacagtaatcagcagaaaaataccttatgggagactgttcctttattttatatctaaatggggctatctccagatataactgtcactagtacgtgatggataaattaaatacttgcttcaaatccactttataataagactagtaggtaaattgatgaataaaggttaaaagtcaccatgtgtctgaaaagtcagttggactttgttgggacagttgtgattggcaccatgttttgcctacttgaatttcctgcatcgtgtttctcccacaggatgaccattgttcctttactgattgtggaatagaatgcaaataacttcagctctttatgattttgcatatgctgaattatcagtatcatattttccactgttctccttcacataacatatatcagctaagccaaaagttgtatatattccctgtctcaatgtcctactttgtgcctccttgtcttcctttttagctttccctccacctacatattcccacaagtgaagattctcctttcctctattcccagtcaaccattacttgcttcacaggttacaacttgtcctagaggtttgctttgtgtaggcyctcattgtattagcaaacatggtgtatttttaaaatgtagtcatatgccaacaataggaaatcatgagatttcatataaagactcctggtttcaaatatcttccaaaaaattagaagtttgacaacaatggaccttcattcctataggtggcaacactgggtagcagctctgtcccttagatggggcttaagctcttcgacacaacatccatgtttacccactgagcccaccattgaagccaagtcatcgctggtgaatatatctatatgaataccacaacattatgtgtgtgtgtgtgtgtgtgtgtgkattcatgcttatgatattcttacaatgaagtgtaaaataaagtatttcttgcaggcccaactcgtacattgcttgactgactcttgtagaaacctgcaaatgaaatccttgacttttattggcaacattttctcacttttctgtatcaggatatatctgtcttcctgctatacttccacaccatgatgaaaaatgtatcattggccaccgtttgcactgtcttataattacttctatgcctattttaactctcaaatttaggaagctatgtcagtagagtgttcaatgactgattgagggtagaccttgcaaatttcacagattcatgtgctttgcacatagtctttcatcattaaatacatacctgctagacaagtgaatgtataaatgtgtgtacatcagcagtcaagtggaccaggttgatttgatggaacagtactgcataaaaagcacaactgtattcctgcttaaaaagaatcagaagcttctacagaataacttataatggttaattagtctaaaaaatcaagatgctttttgtaagttttgagttctttttcaaattccacttctattctttgacacacttaggacgtgcagactgctccgttaagtcattaaatattaaatgaactaaattaagcttgaaaaactaccttaagctatttttcccatcttgagtctcagaaataaatcaaacaaactacattttgtgtgaggtccttgctagccagagaaagactgtagaagagaacagcatgactgaatttatttaatttttcttggttttcatacttacttttgacagtaagtaaagacaattatttttttctggtaaaaagaaacagctgaaatttgctctttcaagcatatactttatttaaagtggcgtgattattgtacctgcaaattatacaatggtttaggggctcaggattggtttgcttttcctttcttccaaaccctttactcttatccatccagctgtcagttctctctaataccttctcaattcacacctttcccttaaatttcattagcaaaatgctcattttcttccctcctcttatctctcatctctggatttgacaatcttgccaatgtctactttaagcaagcagagatgaaacagtgaatctagtctctgaaataatgcttcrtaaaaatgtgaatgataatagctacagttgatggcctactgtgtttctggtacttgacatgtatttccaattttcctagcaaccctaacagtaagttttcaccactgctcatttgaggagagtgaatctgagagagtttaagcacttcctcaaggcaatttagctggcaagtaaaggctagaatttgtgtctagctatagctgataccaaagctctctttccacagtattgtcttgtctatatatatatatgaatttgccatttatagtcaattatgtagactacagagacagaggccatatatatatatatatatatatakakakagagagagagagagagagagactgactacagagatgaggtctctctctacatatatatgtatgaatttgccatacatagccaattatgtagactatagagacagaggtctcagattaccaagaaaagaaaggaccaagaaaaagattgtatctttgatgtttgtaatgctgacaccaatttgccattacatgattagtgtatatatatacacacacacacacacaaatcatatatacatctaatatatatttatatataaactaatctcatatatacacattatatatattttgtatgtatatataaactaatcatataatggcaaattggtgtcagcatttagaaacatcaaagaaaaaatatataatctttttcttggtcctttattttcttggtaatctgagacctctgtctctgtagtctacgtaattgtctctcttgagaatattgaaaacycacaagttttactttgctcctaaatgtcaagaaggcatagcctaaatgtcaataagcatcaaaagtctttctgaatgagatagtgccagcattcatcactgttccttctcagaacctcaagcctactctttccaattamcctcatatagggaagccccaatacactggcccctccataccccttttatctccttctggcaggtctcttaggcagttgctccattggcaacagctcccagcaatgatggctgcattactactcccatcctcataccttcagtgacctttggggtgtttgcagcagctttccctctaattaagagcttgcaagcctccgtgtgcttgggaaacacagctgcaaaccactggagagaattccagcaggaagtactcatccctcgctcccattgtctaataccagctgaggtgtacattacactcaagaaattttattctttcagatgtataatgacctctcattttacgtcaggctctgggtttaaaaagagacagacagaaaatagagaataaaagaaaaaaatcccaccatctctgtctttaaagagatcagaatcagatgtgacatagaaatatgtaaagagaatattgctttagactgtgttaagtgcttgacaamgggagacaatagawtcactaaggtgtcttagaaaaaacaccctcgacatgttctaacaccacccaaagtatacttatgtatgctccaattcgtttagctttaaagttgcccaaaaccacaaactgaataacctcaaggagagcattcagatagttcagagcattcattcccatagtcawccaaaaagtatctgagacaagtctcactcagtttagaagtctattattccaaggataagtacatgcccagaagaaataaaaacggaatcacagaaactgtggtctgtgcctttctacaaagataattttgagggcctcagtaaagggaaaagtgggctggaggggaaagaggaagggtatggtaacccacatggtgcaagagagaaggagcaggtaagggaataatcaattatgtattcctctcatgctcagtaaatcagcactttacataaaataaggtgaacgtagagtaggatttaaccttttatctgtagctatctgcttaagaaaaacaggaaaggcagcttctagtatgactcagctttcagctttttccttttggcctagtaaattgaggtcccagtttttattttcctttcacaccactgaagttgagaagctgtcatttccccctgccatctatttgcataactagagggcataacaatggtgccagattctttgccagtttcccccaaggagtaactgactagctatgtaaatcacattgctggaagccttctggaacttaaacaaagagtaacttgagttacatattaattttaaaaaatgtaaaggctctccttcttgtgaaataaacatagctcaagaaggcctatacaaattgtgatagcttggccatcttcagcatcttcaccatcgctgttcaggaatccagggtttttattgaaagacaagcatcagcttgcttctgtccagcctcttctctccaactacccattctgtgactcttttcccacaggacattcccttcatattttcctttagagtagcaatagttataagctactacacttttttaaaatattagggtatggcttgaaatcagtgggtaataaaattctaatgataaagtcaggagccacggaaatactggtagaagaggcacttccccagcagaggcctcaccctcaagcctggagaccatggccctaaatgagaacagttatccctgttttcctgcctaaatgttgttttttccaaaaccaccctggctcaccatgactgctccccccaccaaatcctgtacccataaaaaccccaaactcctctggcagaggagcagagtggcatggcagaaaaggagagaagaagcatctgaacatcaaagaggcagctggacagtcagagaggatttcagctgggacagccaagctccaggggaaaattagctacctactccatcccctttccagttcctcatcccactgagatcccacctccatcactcaattcaccatcctttaagtccctgtgacctcattcttcctgtatgccagacaaggacctcctaggtgccaagagggcaagttgtaaaagactgtcacctgactccacactgagcttgttaacatttggccatccatggaaggcaactgctgaaagagcactaattgtaacatacccctagatgctaccatgggtctggagcccaaaagcattcaccctggccccagcacacactcgcctgcatgctccccctcccacaagcagctgagtaagtgaagcacacccaggtcgcaaatcctctgaaggggtccagggagctctcccatctccctaattctgtgttagcctaatttgcacaagttgataaataaatgaatatatcttgatgaattcatttcactgtttagcttatccttggatccataccagagtttttaaatcactacgtaaacatgtttactctaatttcattctgattccaagttaaagatactcatttttaattcaatgagttccttgattgttgtgcacacttttctcatgatacccattttttgattcagaacactcccttattggatttcttatcttcaaaattaatgtcacaggtgcgactagctggggctcgtcatgggtggtaaaggaatttaccacgacagtcataggtraagaaaggcagatttattagagaaggtatgaagataccttgcaagaaagcaatgggcattacaacagagaagaggctgtctgcagagaggcaaggggtggagggaagttttatggggttgtgctggagggggccacatgctgaccgaagccatgctgctggggctatgtgtggaaggaggtcactgtgtccacaggttacttgtgattaacatttctcagaacaattattcattattcttccccacctggggccctttctttgttgttgcttacttatcaaggctccacatttaacctttctggaatctcccaagtatattcatggcatccagttctctagcattagcccacctgagtggcatggagaagtgttgtctctaccagggcctgttgtctcctctgtttgtatatattgacacaaatacagtcattcagtagctctaggacaacggggtttttccaagttatttgttgtgtaaaggttttttgtaatgatcgccttctctatgcacttacattttaaaatatttggtaaaagatatatttgaaatctatcattaggtaaattaccttaattttaggtaatttatcagaaggttgtgaactcaaaagtatctgagacaggtcccagtcaatttagaaagtttatcttgccaaggttaagaacatacccatgacacagcctcaggagctcctgatgacatgtgcccaaggtggtcagggtacagcttgcttttatacattttagggagacataatacatcagtaaatacataccagatttacattggtttaatctggaagggaaagacaactsgaagctgaaagcctggggaggagagggctgggcttccaggtcataggtagatttgaaaatatttttggtaactggttgaaagagttattatcaatagaaaggaatggctgggttccagtaaggggctgtggacaccaaggttttatcacgcagatgaagcctccaagtagcaggcttcagagggaatagaatgtaaatatttcttatcagacttatggtctgtgttgatgttaatgttggaaagcrtaatgaagtatgtccatcccctcttccatcatggcttgaactagcttctcaggttaactctggaatgcccttggccaagaggaggggtccattcagatggggccttagaattttagctgtggtttacaaaattgaggctcaaatattttctaccatctgaatttttctcgtttctgttcctgtttggtgctcaactaaaatgtgagcatttagaattgattttcaggtggctagcttcctggatggaattttgtgtggatatatatatatatgaataatcatattcattttttgatatcttatattaactataagagccataggattaaaataagttggaacagtattctggttttgtcctgcagaaaacgtaagctttggttctggttgccgtgtgacatgatttctactaaatttcactgaagctccacttgaagattgtgtctttttcctttttatttgtgttgattttcattttctattgtttcatgttttaatagtgaggagttgctattctcattgaactatactatactgatataaataaatgaagcttaatacattgcataaaatagtagatagctatattaaataatttttggaaaggaattgtgacctgtagaacttactgactttaagtacagcatgaacataatatgcaaataatgcttagttcctactcataaccagagagttgggaggaaaggaaaaataaagagtgagaaggatttttgaaggccgtggcaaatttagtctgcatgaaaagcagaactttcagaatagaaattcactctgaaaagaggcatttacagagatagtggaggcccctcttatagaaatatttactgttgtttttaacttagcacctaagtatgcttttgaatcataacacttgaatgagttctggaaagttaaatgctccaagactgtggcaaaaaaacctaccagctttcatcttcctcctttccattcccaactttctctagtactattcaaaaactccctaattaggaattcctttgggaaattccaatatcagagttaactagccaacctattattgctaatcatttattcctaccctctatataaagatgaccagcatgtgtgcacacacacacacccagacacacatctccctatrccgttttctttttttcgttcattttctttaaatttcccattatactttttaaaaagtaatattgtccaaatttatagcactgtagttcttggattgtttcttattacttttgcatcaagcaagraatgatattcagaacacttaaagttctgattggtatggtatagaagctgcatttcccacagtcacaaagaaggtcatactccatgttaataccaggtagtatccatcattagcctattagaaggtactgatagtcacctggaattcacctaccataatgatagtggcactggcaaaggcattgtctcatccactggagtctgggccagtccctagcagtgaacattcacaggctgatattcgcagacacctctcatgaactcaagggctgcaaccatggttggttagtcaggtggcttaggacaaagactttttatgtaccttaactattttattattttaataattaataagagcgtatcaatgcataccatctatatatcagccccgggtatagtgacaaatatcttatcttgtataagtactatttttcataccaaatttgctaattattaagagtcttcacagttcacaggatttaatcttggtgaaaaaggaataaactaaataataacaataataatagtccaaaatcaatttgataccaaatcaatcaataaagtgatcagagctttaatgctactaggaaaatacttcagctttaccattttatgtttcatttcaataggcaattaatcaaagttaggaaagagtgagctagcttttctcctggaaatttcagcacaggccctatgtatcatattatttcactaattagaaaaaattttagttttgtgttagtgaagatggcaaagacaaaacacacacgatatttcttgttaattgagaatgattttgaacatattctcaactactattttgcccaagatacttcattctaaaagatgtcatttctgaataaagagcacatgcaataaaattgcatcagaaacagaatccctcacataatattcttacaaatttaacatcactttagagaatagctattgacttttgtaagactttattatttgttcattcatttatttttttattcaacaattatttgggttcatactgtgtgagagaagacagtaagattagaaaattgttacaagagagatatacaaacagggcagtagaataagagagaagagaaagatggttaaagaatcttcactcaaagttatctggtgatcaaaatctgagcttgctaggcaaatggaggagagaaagcacatccccaggaaagggaaaagtttatgtaaatagagagaagtctatatggggtatctgaacaaggggcactaacagatcatacagatctttagtcatacccaggagggctgggtatggtggtttatacctgcaataccagcacgctgggaggccgaggcataaggatggcttgagcccaggagttcaagaccagcctgagcaacgtagtgagaactcatctacaaaaacttaaaaaataaaaaataaatagctatgtcaccagaaaagggctcccaatccaagagaccccaagagagggttcttggatctctcacaagaaaggattcaaggtgagtccataaagtaaagtgaaagcaagtttattaagaaagtaaaagaataaaagaatgtctactccataggcagagcagccccgaggactgctggttgcccatttttatggttattatatttcttgttatatactaaacaaggtgtggattattcatgatttttctgggacggggttgggcaattcccagaaccgagggttcctcccctttttagaccatatagggtaacttcctgatgttttcatggcatttgtaaactgtcctagcactggtgggagtgtcttttagcatgctaatgtattagcttataatkagcttataatgctaataattagcttataatgagcttataatgctaataattagcttataatgagcagtgaggatgaccagaggtcactcttgtcatcatcttggttttggtgggatttggccagctttactcaaccagttttatcagcaaggtctttatgacctgtatcttgtgctgacctcctatctcatcctgtgacttagaatgcctaacttactaggaatgcagcccagcaggtctcagccttattttacccaggccctactcaagatggagttgctctgattcaaacacctctgataaccataccaaggactatgagttgcattctgaaattaatgggggctctgtgaacaaaggcagtgagtcttataatcaaatgtatgatttataatgtttctgggaggaaggcaggctggaaataatcagaatggcctgaaaatgattgcaagttttggattgactataaagtaaggtggcatggtggctgaacaatgctgtgctggttgtgtcaatatgagtgtgagctgtgtcagtatgagtgtgattgtatcaacatgagtgtgagcacctgtgggtaattttaaataaaatgtgttgaaaaatacttgatttttattgaaaaattgcataaagtagctactcaagtatagagtgtttgctttcacatatgcatatcatgttacctacatgaggcaaaacaatgaaaataactggatggctgtagaaaggttttggagaaccattagatttttttaatgtttaagatgctgccatctagtgacacttttgtgaaatcactttgcagtgatattcatgtttgtatcttccagttcttttctcaatacattttatattttaataatttatattgtctaccaaccaatggggaaataattacaaatgcattaaacatagtgtagaagtcatacttgatttttcaacgtggtaccacaaatgtggccagaaggattttcataatgggatattgtacataaaggtttgtggtttcttcagtgtgccattctttataagtaattgataatgaaagtgctgctttttctatttcttgagttttcttagaaaaattgagttgtaaaaacaaatctgtgaaaatctgagctgtaaaaattgcttcataaaagttgctttaattggaaatgttgaagagaagaaaagagagtttcaaatttagaataattaacttttttccccatatggaatttcagtattataagtatatcttaaaatataaacaaataaatgtgtgtggaggggtgtgtgtgtgtctgttaaagctaaacattagtctccaaacctaggttgtgatgacctgatgacttctaagttttgatgaagattaattatattcatgtcctattactccttaaacttatattacaatggagcacttgtcttattttcatggtacgtattgctcattttctttggtgaggaacaaagaataaattaatctcccttcctccctcaaaatacagttatattgtgctgatatattgtccttttgtgagatactaactccagtcatactatagtgaatgaggttttaattaattaacttttcagtatattgaggtttctttatgcaaaccaatcctatagggtagaggtaagcacatctttccgtaaagaaccaagtagcaaatattttaggctttgtgggccatatggtccctgttgcaacaactcatttctgctgctgtagcgtaaaagcagccatggacaatatttaaacaaatgagactggccgtgatccaaaattaaatttacagaaacagactatagtttgcatgtctcttctctagggaaaacacctgtatttgtaatttggggttctttttttcttaggaagtgttagaacacttctaaaatttatttaagtatttacttcaaaaactttaattccattgagagttgtgtgccttcagtgttccaaaaaatctagtttggagcaggtatgtgcacttggtaaactaatcgtacacatagtaaactacacttggtaaaccagtcatacacaaacccagaggtaaaatgttttgcaaagttctatcacctgcatttagccagtttttaaattcatgttcatgtacaaagttgtcttaatgtggaatgaatctttatattttctcagtaaacattgcaacattttgatatgcagtaagttaaatgactttgatcatcagcaaataaattagaaacttcctacttgggtacaatttggataatatgtattcattgttccagtttgtgcttctgggaatttagtggaaacagagacttgcttttttaacattgtgaattccactaggcagacacacaaaacacttaaaacctcatgacaagtaaataactaaaacagaatggagtcagatcagaagagactcttagggtacaaagtcaatgtgtatgaaggagacagtagagttaatattaaactttgaaattctctcccaaacaacttcattcttcctctttatttttggataagaatactttttaaaaattaagcaccatataaaacagctggctcacattgaggatctgtactgtatcaaagtatgcatattttgcttaccaaatagtattaagcaaggattgttactcttattctaacatgagaactagaagaactcacgcagtaactgatccaagcctccatcttgtgatcctttggtatcttgtactctttaagaggaatggcaggggtaattcctaagaccaagtaaaggatgtcttggtttttgggagctgagtatatcaattcactcttcccttaaaatgctgtgtaacaaatcatcttgaaacttgttgtcttaaaacaataaccattgattttatggatcaccttggcatcagagcatcaaggtaggacttggctggaggggttctgcaagtctcagctgagctcattcatgtttctgtggcaaactgcaaggggtgaggagggcatggaggagcagctgatccagattgagttcaggtgaggatgattatgctccacatttcttttatcttccatctgggccagcagtttggcccaagcaagtccttctcatagagatggcagagagcaagagggagcaagcttagtcactcaagtacttttctgagactatttttattacatgtgctaacattctkttggtctaaacaagtcacatggctgatcccagtggctgaaacttacaccttacccacagtggaggaactagaacttacatggcaaataacatgggcgcaagagagggcagagaagcagaaccattgatagaatttataacagtgtatatacttgaactgattaaatatgcacatgatgtgggattaaatgctaaacaagaaaactattgactctttcatattactaggatrcacttaagcagcagttcagaaactttttagaaaaggaaaccttttacactcttaaaaaccactgagggtcttaggagatttgacattggctctatatctgtatttactgtatttgcaattaaaacaaaattttaaaatgtatttatttgttttagaataacaacaaatgcattacatattaacataagcaaaatattgttatacaaactatgttttctttaaaaaacagtagcattgtttatatatggcaaatcgtattagcacctgacttaataaaagacagctggttttttatacctgcattcaatctctttttttctctttttgaatcttacaaagaaaataggcactcatgaagatatgtaatcagaaaaggcaggagtagttgaatagcctttccgtcaattttgtgtattctttgatactgcatcagaatttgacaagtgagaactttttaggagttctggtatggaatttgaagctgaatcactgaactttctgtactttattatattaaaattcattgactgaacttgcattttgaatagatcctttatcaatgcacaatatgtaacatcgagcattggccattcagaaaatattggttcattgaattatgtgtattttccaaatattgacatatttaatcatataataattagaaattatgtattactactatattcatcagaattatctcaataatgggagctagtcatactcatggaagtggatacaagtttttcaatattctaatttcccctggaaactctaattttatcattggcagcaaatattataagttgttttattgaagtgacactccattttcaaaagaatatctgttaaatacatcacacatgtgaatcgtcattgtttgtcagttgctctttcatgcagaaatggttgtccatgatataaaagtggcaggttcagcttgccactcaaataattgcataaatacattgctttaagatagccatcctacatcagaatgtggtcaagggttttatgtgtacttcccacactcaacattaaaaatatagaattaagatattgagatttaatgaaaattgatcatttttacagttttcacaaggatattttcacatgaaactttcccatgcccccaggtgaaaggctggaaccaatgtaatgactactagtacagttcggtaccgctgccttggctcctgctaaggtggcagctgttttacccatcactgcttttgcattatcaatgcaagtgtcaattcagcaaaaaaggcaaagaatgtcttagcatgatgacaattgctttgatctggtgggccttctgaaagggtcctgggaattatggatcatactttgtgaaccattgcrtcaaagagcaaaccataatttatggtacagaagtttgtcaaatgttttcttaaaaatatttgtacttattatttctaatcatgaagcaaacttaaagcttattattgtgttcttccctagggttgttatgttggctttgatctagcacatgcagttggaaatgttgaactctacttacatgactggggagttgattttgcctgctggtgttcctacaaggtacaaacgagttaatacatttacatccctttatttcacattgactttaatctgaaggagaaactgggtctgtgggccaattttaaagatttgagttactttccctatttcttttattgtattttctgctttttgttaatcgagttatatgatggaatagtatgataattaatataattctagtatttctatcaatatagagaaattaattcttcaattccttggctgctatgaaaaagtcaggaggttctgtagaaaaakccctacacttaattcaaattgatcatctttttagtttttttattgataagttgtgaaatttctgcatatataaagataatatttagagaatcaacttagaattcatatttgaaaacagttgacagggagcatgaaaataaaaccaattacaatttacttgctttaaaaatatatttttattattattacaatattttaggacaaaataatttaaatgtatgaatttcaaagccrgatctcattaaaactgctttctaccagctggagcaaaattgccccgtaaaagtaatagccatttattctcaacctaataatactattttttatttgtttttctttgaggaaggtgacctaagcttctgttttatcataaatacacaaataatcacacattttgaactgatcaaatgttgtggtttcaattaaaaaattcaaatgactacattgtttagttttgtcatatatttaagtaaacccacataatttaatttattttcaatctagtatttaaatgcaggagcaggaggaattgctggtgccttcattcatgaaaagcatgcccatacgattaaacctgcgtgagtaccatcttcagctaattctttggtgatgaacaaattaatttgcattaataatatgttaaatttacatgagttccttaagatgctatccaataggaattaggattggattataattattttcctactctgctaacaacaatatacttcatttgaaatacatgctttccaaagaattcaattggttgaacaagaaatttaatcaaaaagggaagcttcagtgctaaaaacaagtcaytgcaatcatgtaaagcggatggtttaatgcaaagagaccacttgaatattttttttcaaaaattagactttagaaaatttcagattcctcacgttgatgaataaatcaaaggcaaccagagctgtgcctaatagagccttaaatgtggcatgttattattaaaattacatctacctttaaagctgtaaatgttacatgatagcttgtagggaatatcttctgtcctaaaagactttataatccatgaaacccgaagaagctgaacactgaacaacagactgactacataaaaagtaatacttttctgttttatagaactcttcatattttagagcaagtataaatgcaaatrtaatacaccaacaaacttacacatttttatttgactggggaattcrtaagtgttccttttacttttttctggtatggaaataaagaaataatatgctgggaagaaaaaaaaaaacccttttcatagttgttgtattggagtatgtgtggtgaggagactgtctagactcctaatagataatgtaataatgtttgattagttttctgaatttcctcagccactgactgagtggtaaaatctttacaagaattgaagctgaattagtaataggctttggagcacctcacatttctgaagttctgtgcatataaatcctaggaatttaagatgattttctatagtttctttaattgtgtctaaatttttttcaaggttttaaggttttaaacttaagacaacatttgtcttaagtttaaatatctttggacagatatttagtcaaccagacatcttacttgaatatcattatcagtacattagatttccctccatgtatgtcccaacatctctgagaagattaaaaagcaaatattataagaataccatgttttccacatagacagtatgtaagatattgcttgcttttgtatgatgactcacaaccctggccatttctcagtctccatttatttaaattgaaatagaggatctcatgtattatatcaacccaaagggtgagccagtgcccggatagaaggaggtggggtgggggggwagaagtaatatacataaattctagagaatgtcagtgttcggagttaagctttgacctcctagcacacacaggtcttgtacttgagatttctctcagcatggacaaggaacaaggacaaagggattgtattgtgctcacatatgcctcattttgtggaatttcaaaatcttctagacaatgtttaaatctatgttaagtctaagctcccaagagaaagaccatctaggcagaccaggttcacagttcagcttggtctttcaggggtctgtcacctggagaatcttctatgattgttcagtattctggtctctgagctgaggtagtaccagcccctactcataagcagttattgtgagaataaaatgagatgatgtatgtaaaacactaagtgtatcacttgaacatttaatatggtttggatttgtgtccccacccaaatctcatgtagaattgtaatccccagtgttggagcaggggcctggtgggaggtgatgggacaatggggcctttccctttgctattctcatgatggtgagttcttaatgaaatatagttgtttaaaagtgtgtagcaccttctccttctctctcttcctcctgctctggccatgaaagatgttcctgcctcccccttcaccctctgccatggttgtaagtttcctgaggccttcccagtcatgcttcctgcacagcctgcaaaaccatgaacaaattaaacctcttttctttataaattacccagtctcaggcagttgtttgtagcagtgagagaatggactaatacagcattatatgtgatcaataggtatggggttatatgaaaaaaaaaatccaaaatttacaatatacaggaaaaagatgggtgacattctgtaacaccctagcccaagtattgtttggtarttatttagtactgacccctaagtacttcgttgactcactgagaatgtgcatagtaacatgtagactttgcccagtggagatcatttctcttaagcagaaaatataacctcaaagtttatggtttgtgactttgtaggacattagtttgtaactatcaccaagtttattttagcagacctttgatgagctgactgtagaatataatctccattccttggagatataatctctcttatatgctataagaaagaattctggccttcctaccatcttactgattccgccactatttagtgggttgaatgagatctttcatggctgtttattttgtgtgtgtatgagaaccttgcttttaagttttttggaaaattatatgttattagctgttgttgcattttaacaatttagccatggaaatttatgggacttaaattaggcttgactcatgaaggccacgttaaggaaaaccttggttgtttttctgtttattgttttctcacactcctaagcttctttttaagtgatgtcagtgactgatctcagtgctgtcaacttctagccttggctctctattctgtaccaagtatcttatattgtacttcatttgcattaggagatcggagttctttaattaggaatggaatgcaacagatttggacaagtcaaggacaaggtattttccagtcatcacttcattgtccctgataggaaaagaaatgttttgctgaaacttaactttgtgtcccttagtgtgttttacttttttattcacctgaaaatcaaataccacctgtgagaagagtgataaacaaagaaaagacccaaaagcctacaatatcacgctgctcaaataagtgtaattgttcagatgttacgacaatgttccatacataaaatattgtgaagatggggagaggaagttttcttgtgaataatatttatagttccacggtcaaatccaatttaaactttgagtaaactttagagtctgtatgactactgactctatttgccaattaataattatatttcagttgttagcattccamgattagctggtttaactatgtttaataagccttctgtcatcttacttttctgttctcttagagctttagagagaccaaagagtttttcactgttaaagtgtccagtatgtagccragaaccatatggagaacatcaaatacagtggaacaaatgtaactgctattgatgtcacactttgtgaagtagtctttgttgcttaaaaagggtgacatctagtggctaaacatgttatttcaaataaataatatcgaaataacatttcttctcatggtccactcattcactctttaacaagtattttgaagtatatatgtttgaattatgtgttcttctttttgacaatttgactatatgttgatagtgcaataattgtgcagtttaagccttcaataaagaggtagaatgtgatgaaaattggaaggaaacctgagggggcattcttagtgcttggttaaacagaaagcttaacagttcatgaaggctggtctaagaaaggaattataagcatgggtgacccacctggtgtagagagtgtatccccagatatataacattgcattttagaagtctaatatttggtatataatttttgaaatagtcctttatgtgatgtttccattagcaaacagcaaattgcatctgtaccaagagatttcacttccttttttgtttaaatatgcattttggacattgttcaaaacctatgacctaaggcttttccaagagccctttgcccataaagagaatgaataaattagaggccagagtcaacscacggcattaagcatcataactcaagctgttattctcacctagaatttaaccttttcctagttcattattaacttagctcattgcaatgtcatattctaaactctgtctgtacaataaattaggactggtcatgacttcttggatgtttttgccccacttcaaggtagactttaattcagtctacacagttaattattgctctgaaatatgaagggaactactcttaattgtacaaatttgacaatatgaaatgtttcactaaaaacatgcttaaataacattgtaaattttgaatgttttaaaaaaagttacaaatgttaaccctcatggcacactttagaggactatttaacctttcaactttaggggattcaaagctttgtgaatcctttaaaaggattcttctgtaagagcccatacattgcgatttaagataccacctccctctttttttgttaatagagagtctactatgaaaacaggagtggataatatgaggtattacaaatccatctatcatttacttttttatgtgagccagtgaaatcatacatactgaaaacctgctgttcctcactcttcacgctggtgtagcaaacctccacatgtgcccattgtattagattctcctaaaatgcacatttcccttgggatacttttcttctgagcttttttgaatgggcaagaatgggsccgactgacaattttgataaaaatacttgaattttaaatcatgccaacacatttccataatcagctagaggtatttgattgaaagttttaaacagtgatgacattttaaaggccttattaagggcttgaattatctcctttattgtaaagagtaatttgctggtgaaaaagaaccagttgaaaaggctggctgacttcagtgcatggttaagaaataagagttgttactatttggcaacaacattagaaaaacaatatgcatcaaacaattcccaggaaagtcccagaaagaataaaaataaacatccagaaatttcagcaaaaagacttaaaaaattataactttataccatgcttgtcccaactgtacagttaacattgtatgaagagatcgtcttttgcacatttgttcaggggaacactgacttatatatttcacttccatatgcttttccaggcaacagttgagaatgccrtagcccaaaacttatctataatttaaatcctgttttagttttctaatgatgccttctgaattactacttatcaagtccctatctagtaccagaataaggccttcttgtgcaaagtttgagacaacaggaagcataggtcgcagtagcaagatgtgtgacttcacaacacttctgatgctttcaaatgagatagaccagtaccaatagatttctcagtgagtttttatagaatccccagttgaaatatgacctcggccttctgagkcacctgttctgcttrtttagcctgtatttagccagtgttaatatggatgactttccagctacaacttcttggcttctcagccatatataattggctatctcctttgtctttaatatttgcctcccacatctctaaacttctgtggtaccgttttcttttgcttctgctccaatggatgtgagaactcttctgtattttaaaatgtttactttttcaccttttcattgattctctcaaaacctcagtccttaatcctcttgcccaaaagtatctcatccacagttatttcaacaatatacaactggtgtagaagaaacgaacttttatttccagctttaccacttgcataatttttagcccttattttcatctgattgcaaattgcaagagtttgtcattattcaaacatgatctcagtccccaaagatataaggaaaatattcactaataaactccctgcttgtaaaattagtccttacctgaacatcattttccaagtagcagcatctatctctatgaattactctacaaattcttagtatcttgctgattatataatatcataaatatcagataatacagtgaaaatataatgaaaatgattttaaagtaagatttttcaagggagattcaggatgtcatgatgcaagtgaatttggaaaactcctgaatcacaaaatcatggctaatgataatatgtcagagcagttaacaggtgaagtagaggacatttgacaatgtacttcaaaaggaaataactggaatatcaggcattcaagataaatgataaatgcctcacaaatctatgtaaaaattatctttaaggtcatgctgagaaagttaagtatactataaaagggatgatattttgctaccatatcattttgtcaagaaatataccaaaaaatcaacacaccttatccttattcttaattattagaatattataattttaatctatatttctccaaatcatatattaaattttaaaaataattttaagctctatattttaagatagcatctctgtcaaaccttctgccattgactttaaaattgatttatttaagtggttttttcatattttcatttgtcatcagatattaaggactttggatatgtctgtatatgtgtgtgtatacatacacacacacatacatctttctatctcagaaactaaatatggtaaaacttgcattttatctcacataggtatctttctaaggtaatcttcactttctcatgtaaagagaatgatcctgagtttattaaagagacatgaacaaacataaccaaccaatatttttgtgcaaaaagctttcatagatgaaaaataaatataggctattgcctgcgattttaaaatgttataattcatttggagatatatcttttaaccagttaaataagtgatttaagtcacaggcaacccaagcttagaatatgtgccataaggcagcctctgattaattactgggtgaattctcagactgcttttgccgtaggggcagcggaggtatagcagactgactcagagctgcttgggaagagcttgagcaaggaggtggggaaactcacagatacgaatcttctgtaaaatggaatgcaatactaactaagtgaataaatttactttgttacattgaaaactaaaattgttgcctgtgagagrgattcatttcagaagttccataaatttaaggggatataaaaaagaagaaagaattacttaaatggcatttcttaaaggaatatgccaagtgatcttttcctttttattctcctcattagaatttttrtggaattggagttattgacttaacattttaaagcctgcctcattatcataaaattgttctttatctttcaacaatattttagccattataaacagtggtaaaatcgtgattgctttaagctctcccttcgctctgggaacacactcttgaagtgggttacacctgtcatcagtcttagtcctcaaatggtgactgtaagggacccaaaagtagrcacaccacttgaagaaaactcatctgtggaatcatgacatacaacctaaacctattttcatttagaaaccattttagatcaataatttttaaaggatttttttaaaaaatcttcctggcttgacaatttttactgtgtgaaattctccagataattttcttgtgtagggaatttaagctgtgatcataaaaataacttacatgcattgaggcacgagcacagttaaaaataaattcagtaaataatctgtatttttttaactccagagatgaagtaatcctagatcttaaagaaagccaaaatagtaattatcagtataaaaacatacattaaagctattcttgcttgtaaatcgctactctcagataatgatgaaatagtcattaatttgagaacactgaagtcctttgaaacctaaacatttattttctgttctaaaactgcagtccagtgtctctgaagatatatagggtcaatgaacctttcaggcataaaaagtaaaacttgtcaaagagcttcagctcttgttttaattacttcaagttttakccctaaagtaacctttgaaatctgcagggactttatttttttttcttactattaatcgtgaagagctattgctacattttcatgtgttcttgtttagaacatacatgtatccatctggctttttatgatttccaagcagacagggtggaagtttgttgtaataatccatgctgtgtgaagcagcattgcgagctgcctcagcaacacagaccaggtaccaagtcctggtacttccaacactgaggcaggctaacttcacagtctacacaagaatacttggaatatattactcacaacaaacttctaaaccacgtgatccatattctccatgttcacctgttttgctcttcaagaggagagaatttgattgggtgggaattattcttttgtccagagctagcatctattgtcctcatgaccaactcatgtatagatagcttgctttgtctcccatatcagtccctgctccaatcagctttggtcaggatttaagaagatttcgcacaagccatggcaatttaggcagaaaataaccatgtggcactatgttttttaagggcccaatgatccctatgaaaattcattttagcatgtcttatatggttgcttaataagtttattatagattgaaatcttaattctaaattctttgagtcctgggacattgtcctgttaatctttctttactttcataatctacagtgcccaagaaagtattttttaaatttttgttgttgaatatatggctctgtctttactctcagcataatagacaaaccatcttctagcatatggaagcatttctactttgcaaattattctgaagcgggtatgatttgcaaaatactgtcaaattaaatatgcatttccatatgcttctatgaagaccaaatatatccatgaaaactagctacagacaactttaaaatccttcatgaatttttaatcaacattgatgaacaaaattcaagtcgttctttctaaagtcctaaatctagaaaactttctgttcttggacttggagcatcggtattaactcaaaggattattttaccaatatttcaaaataataagatatttcagaaaagtatattcagaaaatgttcaaaggcttttttgttactaatagtctcatgccaaaaaacatattgacttagctcttataagaacaacatattctgaaactttagaaaacaatttttattaactaaaatttatcatttctggaagtgcttttttatgactatgcttatcatactgttagcttactggacatattagaacaagcctcttacagagtaagatttgaagaggtaattgaatatgtaacagaaccaagtgaagcactaatatttacagatgggtgggcaaatgagaagaaaaaaatgaaactgaattttatgatacwtcctaaaactactttctaaaatagcattaagtcagctaacttcgaacaaagcagaacaattgtgattagatgaatattttattaaactaggaattgatagagatctttttaaactaagagtatgttagcaatattgtacctgtttaatggcatggcatgccatgccaagccttctaatgggcatgcttggggaccagttgctggcatcaaggggtgaatgtacagtttatgagctgaagcaatctactttctcagttttcaacactttttctttgtcattagtacctttgaatctgcttttgtcacttagccatacttttgtttttcctaccgctatgctgattaccaactgcctggatttagactctgtttgctccttctctcattgttttttgttttgtgttgttttgcccacttgttttgatgcatatctactgttttgtctgattgtcattttataggcactagttcggtgttctctatatgtgcctgaactactcttatttctgaactcaaatatctgcttgcactgtaccaaacgtgtctctgtttcctaagcctttcttctcactacacatggtagtctagcaacattaatgccctaccgtgggaatatggctgaagatcttgactaggggacttatgaacccatgcagccgtgcccaaatcctaccaaactgaccttactttcttgaagacagaattgtagtatggtcragctcatgctttttgtagtaggccatccaaattcgattgactggctaaaaaagattgttagtggaggctggaagaaacattttggctgatgatagatgaatagagcttggaacaatcaaaaggaaaagcagaaagtctatacctattcataagaaaaagttagtatgtttaccgaacattatgaaagaattatgacattttcaaagttttaaaattttattttgtagrgacggggtctcattgtgttgcccacgctggtctgtttcttgaggatttactatagactgggctgtattcaaagcattggggatacaggcatgaatgagcccccattgtcctgaacttaccattcagtctgggcagtgaaagaagagggatgttgggagaaccttacaaagatgaaatgtaagctaactggagaaatcccctaactttcagtcagactgaaagggaacaggcagtaactgtgggtagccctcttgggcagggtgattttccacatgtgccagtcaggggccagaacattaagatccttatgttccaactaaggaattttgrttttattttaaagacaaaggggagccactgactgttcatgaggaacaagattacaaattcaggtctcttcacctctcattaagtcttggtttgcctgtggaaaaaataaatagaccccagtgatctctggaagattctcttccagctttcgaatgctgtcattctcaagtgataaaaatgaagcatcacaattgagtgaactgctggtagtgatagctcagaaactaaaaccagcttgatggaaatctgagcatcaccggctatatcaataacttcagtgaccctcctttccactcctttctgtaataagtgcatgcagtaaagtacagccagttcagacaacttgataacaaatttgctataacattcttatctttttccttttctcaagtatgaatgagtactatgtatatatttcttaaacttcagttgctaaagtttttactgtgaatattaagactatatcaaagttatttaaatggataaatttccaattgttctctaaacaaaacaagatttgtggaagttttgactctatgaaccctgattatttaatgaggaaaataagtaacrtacttcagattaggttatagaggatgctaggatgacagacattctaacttatcccaagttgttattacagactttgtttatttttagaataaacaatcatgctgtacccagcatgttccatgtttttgcaatgctatgacaatttgtctgatcagcacattttttaaagccaagraaacagtaagacaattatatttcattttaagttatagcctttaggaagagagagaagaggaaaagaatgttcgcattcctgaacacaaacttaaattattaaatgtatggtaataagttgccaaattaaagaaacttatgacagcagtcttctatgaaaatgtatgttcttaagaaagattgtgaactatttttattatattttgatttggtgccaaaggggaaattgttctttaacataagctaagaaacagatgtttgttgtttagtttttgtgaggttgaggtgagagataaggggtttaaaggataagttaatgaatgacatatttaggaattcatattgagcattttgctattaaagacttgctgaagagatcaaggagagtttggatatttcatttcataactcctcacatccgaaatcatattcactagatccccagtggctttctcttactgaatctgagtatcatgcttcaaagatgtctttatgataagcgatgctttccatttgataacatttatttgaaactacttttttggaatttatgatgttcaaagaacacacagcatattaatatgtctgcttttattatttactggatctcttccaacacgttacttctctcaaattctgtttatatctccattcttagtaaattaattccctttttgatttttaatttttgatgagaaaacatttgaatttctagtccaagcacaaggagattgtatcttaattgttattgttgacatttagtttttaggaatgatttatgagcccattgtgataatagctacttataaactaattcagtggtttttaattttacttcattagctttcaaatatttgctttttaagaatccaagatttcattacgattgcatttcttttgtgtttggattttacctttcctacattccaagtgatggatcttaaaatgaatttaacttcctcctagattctgtgcaatgtatttcgtgtttaaatgttgttttgaaataatcatttctttatttgctttttaaaaggttttaaacagcgcttatttctgtttgtaaagacttgaacttgtaacagatgagtgatatgcttactcaagttcactaaatcaagtgtctaggatcatgcattttgaagaaaggcaactccttatagagattctaaaagaatagagaaggtcaaaagaacatttgtttgagggagtggacattgtatatactaaaaagaatagcttctgtgaccaggcgcagaggctcatacctgtaatctgacactttgggaggttgaggagggcagawcacaaggtcaggagattgagaccatcctggccaacacagtgaaatcccaactctactaaaaatacaaaaaagttagctgggtgtagtggtgcatgcctataatcccagctactcgggaggctgaggcacaagaatcacttgaacctgggaggctgaggttgcagtgagcagagatcacgtcactgcactccagcctggcaacagactgagactccgtctcaaaaaaaaaaaaaaaaaaaaaaaaaaaggattggcggttttccctttccccttttttggtttttcctgccctactttttggccccccccaacccgggaggttttgggggaaccttggttttttttaaacccggggttttttttaaaaaccctgcccccgggggtttggcttttttggggaatttccggggccgggggggttttttttccctttgggcttttaccaataaaaacggggggatttttaacttttttttaaggggccccgccctcaattccnnnnnnnnnnnnnnnnnnnngtataattcataggattattaaaaattaagtgattgctttgaatggtgtctggcttataataaaatctcaattaacatttctttttgttggtctcaatattattaaaacaactaaaagaacctaagtggaagaaaaatcacacatgctctaagttaaacttgtttgattatttttataagaccttagctgagtgtttgaggagtcatcaatcacctagggtcaagttgtgagctagcaattggaagataatatgggaaacaggctctctaatattgttttactaaatgtaattattttttattttcttatttaaattagtaatgtttttcaaaactttagctaaccatgtatcagtatgggctgttacattaaaaatgtaatatcattgatgttgttcgtcatgaaaatattcagaatagcctgaaaaatgtcatacatcatagaagagagccaacatgtctttatttcacaaggggtatgggtaaaaataaattttaataagacagaaatctcatcttcttgttatagtaatccacttaaatgattaaatttcttttatcaaatgattaaatttctttatcaaatgaacatgtagagcattcatcttaccaagttgcaattttttccagaggagataacatttagaatttcattaagattgaagatcaaaaccaccaattattaaaataacaaggtaattattaatactctatatccaaataaagacataaaggaagaaaaacatcatatgaaaaattagtgacagtccgaaataattagctaccaatggccccaggactttatagcacatataatacgaaatattccctcccctacttttctgttgctacatggcagaaaactatgtgagtctgtatttatgactggttgaattgttttgatgaatattttatttaagtaattgctatgaccactgaattcaatgatatcactgttacatcgagatattaatctttatgccatgttttacagaaaattgtattattttccacatccagagtactctgactccmtttactactcattgttagagaattataatataaataaactctataaagagcaactattttctttattctattgatcttactcttattgaggtcaaaatagaatacagagacaaatctctaaatttaacattttatttgtgaatcacagaattgcaatttggggcacacatacagatcaggcagtcatcagcatgtctaaagaacaaagaaaatgttggggtatttattttaaagaaatgttacatatccttttgaaagaaatctctctggcactagaaaagcttttggaagctggcatrtctctaactggtgagtgacagtggtaggtaaaactagtcttagttatagcaggtatttcagcagatactaagtgaaactgggcttcgggttacagcaggtagtttcagcagctgggcttgtggagaagtcaattcttggagcagtgctatgtgccctgggtgctttttttcctctggcctttagactttgatttaggtgagtatgacaagaatgacccaatttgtataatcagcattcaccctcttctccccttgtaattgcttcaatattcatgtcgataaaactgaaacatcttatcttgagtctctggtttcatatccttcagtgtttcaatccacttattgcctcactcatgatgggatatgtcagcactttgtcttccttaagtactgactatgaaaatatcagacacctagctttgactctattttccttctcttcattctttctatctcactttgtcccctggattgttacttcttggtgtggagtcacagatcctatctaggcaagagggagtgagttagacaaaggcatgaacactaggagggcactttaagagtctgcctaccacaattccattgaatatacttaattaccccctaccccagccatcctcacacccaatagactttaaactattggacagggatggtgggcagagacaatgcctgttttgtcttatgctgtctctctcgggcttctagcaaattgtctcattaactatttttggattattaataagtgaaacataagaaaactctaataagcctccaaaaagaaggataatttaatcaggagcataaacaatagatatagagcccttagtaacaagtatcaactgtagagttgttaaaccattttgctttactcagccctacttttcacctctgctcttccattcagtttccagggaccgagcatctcagcttctgctttcctgctggcttgttaagatactcagttttactccctccttcaactttgttctggttatgctatcttgatcacagcttcttgcttgtggtcagtgttcctgattatttattgagcaggacattggcttaactagctgtgcccctttggatgagtcactcaaccactttaagccrtacttttctcaaatctaaaatggtagaaagaatatctacctcaaagtggtgttgtaaaaatttaagtgagaatacaggaaatgactatgcccatttcccagcaaacatgtcttagtttcyatccatttttccttagcagctagatgtgcagaagctttgctaaactattccttttgaacaggatttcttattggcacaggagccaataatttgattcgccaggccattcttaaatgttctatgggattttatagcttccatacaggggtaatagatccacaggtaatggggatggggaaagacaatggatggcaaacaattagaatcttcggtggagctggttcaaggtccagrtgctctctttgtgtcctttgtacaaagctggcggaaatatataatttcttaagtgaataaatgcaaaaaagagatattagcatgaaataatgagataggcaacttggaaattctttctttgtaaacaatcatattgtacttatactttttcagatataaagcacttttgtaacttcagtaaataaaacattaataaaaccccaatgtcttgaccacagttacggaatcagttctgagttcttttttcctaagaacacattttactcttcgtgtagtcccttgtttctttcatatttgggttatgaaaatgtcatcactattttcaagcacaagttattatttcctcctgtgatactgtttgaacrctaggtctttgatgtttctgtcagatatacccagcaatcatcatcataactcatactcttgaatttttaatatcactccacacacagaagtgtcaagtacccagttctttagtgaatgcacaaaaaatgaaagaaaagtttgttaaataagaagaaagattgaaatactgaaatattcctcctgatttttgttttgatcccattgaaaataaatgggaaatacatgttgctatttttttcattgctctgtctcacagccactgtttgcatcagatttttaaaaaagaaaatgccaagcagtacattttgaatcagtttccacagaaarcattatgtgcataaaatttcatatattatctttgatatgtaaatataggagaaataagtttctttggtaaattttagcatttcttcttttcaaaaaataaaacataaaataatagtcaatggccctatggttgtaaactatggtgaatgcatctgattcatttatgctagaactccttccttatttcctcctttttatgcaaacattatcttaccagccttaatgggggagtcacaataagttcccctcagtactcagcacagggccatccatgcttgcggaaagaatgggctttgaatatacatcatgataaacattagtacattaaataagcaattactttctaagatgattttgtttttctacacaatttaactcattaatatagctcagttatctgttcaaattaacttaagatagctgtccaatcctgattctgatatttaatacaaaaacacttctttacagctgggggkggtggctcacacctataatcccagcactttgggagaccaaggcaggggaatcacctgaggtcaggagtttaaggccagcctggccaagatggtgaaaccccgtctctactaacaatacaaaaaatcataataataaaataaaatagccaggtgtggtggcgggcacctataatccccgctattcaggaggctgaggcagataattgcttgaacccaggaggcagagatttcagtgagctgagatcacgccactgcactccagcctgggtggcagagtgagactctgtctgaaaacaaacaaacaaacaaacaaaaaacacttctttacaagactttggtattcatacttcaaaattttgtcattaattttgcttgtctacagaaatttgattttttttttctgtaaaccagatgatatgggttaggttagggtctaactggaatatgaaggaaggagtagataacaaggccattttgaagaataaacaacaaaattaataactgataagactcaaagagaagagggaaataacctaatggtgtccaattcaggtgtctaaaactacctaacagaaagagtggagctgatgaataaatataaagavydctgtgtttgacatattgtgttttgggcagaggcagaactagagaatagggcttctgacttctaatcgaagacattctcctattacttgattaagatcttccatgaacaaacatcactttcatttactttaaacttccagaagacagattacttaatatgcctatcattttgactaattcatgaaaatgtaacaaattcattagatgataggcttctacatttccttccccatgcattaattttcaactgtaaggtttaagatgaataccagatatattcaagtagggagggaatctractaatgtttacaataagcttaccttgacaggcactgtgctagaaacttcacactttgtttaaccataggcctatgaagttatagatgaataaactggtgcccagctctctactggtagaaagttgtgggattgagattcaagtctcaggtccagtaaaatcttccttgtcagctctcaacatggatagttctaaatgtgttgaagctgctagaggaaataaaaaataaaggcagcctggaatggttgctcacacctgtattcccagcactttgggaagccgaggtcagtggatcacttgaggtcaggtggttgagaccagcctggccaacatgaagaaaacctgtctctactaaaaatacaagaattagctgcgtgtggtggtgtgcgccaccactcgggaggctgaggcaggagaatcactttaaccagggaggcggaggttgcagtgagccaagatggcaccactgcactccagcctgagtgacagagcaagactctgtctcaaaaataaaaataaaggcaatattcatttttcctcccgagcatacaatactatctttactatcaccaatgtttcctaaattctagttaaactaggtactactaacttaagcacttagagtgatgaaatcatatctcattaggtgtcacctggagggaagttaatctgccatcaccagtatctaacccccctctactaacggggtcactagtattattttcattggttgggtgccatctgatccaatgcatcaccaatcaaatcacctcaaggctaacataaattgtgttttctctaaataaaaaccaacaaaaatatcttgccctagcttaagctaagagtgaggcttcctgataagtaggtcatccagactctagggatatgttttccccatgttggayggaaagatctaccctgtagtggagatgtgaggtatttgacaagtgtaatagatgattcaagtctgayactagcaaattcattaatactatgatgagactgcagtcacagatggagagatcaatccttcccccaggcactgtctaacactgctttaaagggtagaaagcgaaaatgacctacctggttgtgtctaaagtttgcttagggcagtcacatttcactttaagaagtacctgtagagctctcatataccaggttccatgttaggacctaggcatgcaaagagaaacagaacaaggccctgctcataagagtttccagcgacctagagaaactggaaagaaaatagtctggccctttttgtcaayaagtcacgtgcatctataataggagtgagaacttgacgaaaaaataagaagaaaggctcagtcatatgtcagtaaatttcccgggaaagcagaagtatacaaagttgtatgtttgcaatagtataaatatatatagcataaaatagtataaatatacaaaccttgtatatttgaatagtacattatttcccaagtatttttgttatgattaccaaagagaaaaaacctggaactatttaggttggtgcaaaagtaattgtggtttttgccatggaaagtaatgacaaaaaccacaattactttcgcaccaacatgtaatatttctgggtagagaatgatagattattggtttacaaagaccagtctgaatagaaaaggatggaaagcaaggtaaagtttgctgcagtctaaagctacaagtacacattgcttcagttcatgctgtgttccracaatccatggaagtcctcagaacccaaatcactgaagctgtaagtagagtctagaatactaatggctctgggaggaaatatccaaagtcactgctgattcagctagagaaaatacactggagggaggagccaagatggccgaataggaacagctccggtctacagctcccagcatgagcaacrcagaagacgggtgatttctgcatttccatctgaggtaccgggttcatctcactagggagtgccagacagtgggcrcaggccagtgggtgcacgcaccgtgcgcgagccgaaacagggcgaggcattgcctcacctgggaagcgcaaggggtcagggagttccctttcygagtcaaagaaaggggtgacggacgcacctggaaaatcgggtcactcccacccgaatactgcgcttttctgattgacttaaaaaacggcgcaccacgagattatatcccacacctggctcggagggtcctacgtccatggaatctcgctgattgctagcacagcagtctgagatcaaactgcaaggcggcagcgaggctgggggaggggcgcccgccattgcccaggcttgattacgtaaacaaagcagcgggaagctccaactgggtggagcccaccacagctcaaggaggcctgcctgcctctgtaggctccacctctgggggcagggcacagacaaacaaaaagacagcagtaacctctgcagacttaaatgtccctgtctgacagctttgaagagagcagtggctctcccagcacgcagctggagatctgagaactggcagactgcctcctcaagtgggttcctgacccctgacccccgagcagcctaactgggaggcaccccccagcaggagcacactgacacctcacacggcagggtattccaacagaccctgcagctgagggtcctgtctgttagaaggaaaactaacaagcagaaaggacatccacaccaaaaacccatctgtacatcaccatcatcaaagaccaaaagtagataaaaccacaaagatggggaaaaaacagaacagaaaaactggaaactctaaaacgcagagcgtctctcctcctccaaaggaackcagttcttcaccagcaacggaacaaagctggatggagaatgactttgacgagctgagagaagaaggcttcagacgatcaaattactctgagctatgggaggacattcaaaccaaaggcaaagaagttgaaaacttcgaaaaaaatttagaagaatgtataactagaataaccaatacagagaagtgcttaaaggagctgatggagctgaaaaccaaggctcgagaactacatgaagaatgcagaagcctcaggagccggtgcgatcaactggaagaaagggtatcagcgatggaagatgaaatgaatgaaatgaaatgagaagggaagtttagagaaaaaagaataaaaagaaatgagcaaagcctccaagaaatatgggactatgtgaaaagaccaaatctacgtctgattggtgtacctgaaagcgatggggagaatggaaccaagttggaaaacactctgcaggatattatccaggagaacttccccaatctagcaaggcaggccaacgttcagattcaggaaatacagagaacgccacaaagatactcctcgagaagagcaactccaagacacataattgtcagattcaccaaagttgaaatgaaggaaaaaatgttaagggcagccagagagaaaggtcgggttaccgtcaaagggaagcccatcagactaacagcggatctctcggcagaaaccctacaagccagaagagagtgggggccaatattcaacattcttaaagaaaacaattttcaacccagaatttcatacccagccaaactaagcttcataagtgaaggagaaataaaatactttacagacaagcaaatgctgagagattttgtcaccaccaggcctgccctaaaagagctcctgaaggaagcgctaaacatggaaaggaacaaccggtaccagccgctgcaaaatcatgccaaaatgtaaagaccatcaagactaggaagaaactgcatcaactaacgtgcaaaatcaccagctaacatcataatgacaggatcaaattcacacataacaatattaactttaaatgtaaatggactaaattctccaattaaaagacacagactggcaaattggataaagagtcaagacccatcagtgtgctgtattcaggaagcccatctcacgtgcagagacacacataggctcaaaataaaaggatggaggaagatctaccaagcaaatggaaaacaaaaaaaggcaggggttgcaatcctagtctctgataaaacagactttaaaccaacaaagatcaaaagggacaaagaaggccattacataatggtaaagggatcaattcaacaagaagagctaactatcctaaatatatatgcacccaatacaggagcacccagattcataaagcaagtcctgagtgacctacaaagagacttagactcccacacattaataatgggagactttaacaccccactgtcaacattagacagatcaacgagacagaaagtcaacaaggatacccaggaattgaactcagctctgcaccaagcggacctaatagacatctacagaactctccaacccaaatcaacagaatatacatttttttcagcaccacaccacacctattccaaaattgaccacatacttggaagtaaagctctcctcagcaaatgtaaaagaacagaaattataacaaactatctctcagaccacagtgcaatcaaactagaactcaggattaagaatctcactcaaaaccgctcaactacatggaaactgaacaacctgctcctgaatgactactgggtacataacgaaatgaaggcagaaataaagatgttctttgaaaccaacgagaacaaagacacaacataccagaatctctgggacacattcaaagcagtgtgtagagggaaatttatagcactaaatgcccacaagagaaagcaggaaagatccaaaattgacaccctaacatcacaattaaaagaactagaaaagcaagagcaaacatattcaaaagctagcagaaggcaagaaataactaaaatcagagcagaactgaaggaaatagagacacaaaaaacccttcaaaaaaatcaatgaatccaggagctggttttttgaaaggatcaacaaaattgatagaccgctagcaagactaataaagaaaaaaagagagaagaatcaaatagacacaataaaaaatgataaaggggatatcaccaccgatcccacagaaatacaaactaccatcagagaatactacaaacacctctacgcaaataaactagaaaatctagaagaaatggataaattcctcgacagatacactctcccaagactaaaccaggaagaagttgaatctctgaatagaccaataacaggagctgaaattgtggcaataatcaatagtttaccaaccaaaaagagtccaggaccagatggattcacagccgaattctaccagaggtacaaggaggaactggtaccattccttctgaaactattccaatcaatagaaaaagagggaatcctccctaactcattttatgaggccagcatcattctgataccaaagccgggcagagacacaaccaaaaaagagaattttagaccaatatccttgatgaacattgatgcaaaaatcttcaataaaatactggcaaaccgaatccagcagcacatcaaaaagcttatccaccatgatcaagtgggcttcatccctgggatgcaaggctggttcaatatacgcaaatcaataaatgtaatccagcatataaacagagccaaagacaaaaaccacatgattatctcaatagatgccgaaaaagcctttgacaaaattcaacaacccttcatgctaaaaactctcaataaattaggtattgatgggatgtatttcaaaataataagagctatctatgacaaacccacagccaatatcatactgaatgggcaaaaactggaagcattccctttgmaaactggcacaagacagggatgccctctctcaccactcctattcaacttagtgttggaagttctggccagggcagttaggcaagagaaggaaataaagggtacccaattaggaaaagaggaagtcaaattgtccctgtttgcagatgacatgattctatatctagaaaaccccattgtctcagcccaaaatctccttaagctgataagcaacttcagcaaagtctcaggatacaaaatcaatgtacaaaaatcacaagcattcttatacaccaacaacagacaaacagagagccaaatcatgagtgaactcccattcacaattgcttcaaagagaataaaatacctaggaatccaacttacaagggatgtgaaggacctcttcaaggagaactacaaaccactgctcaaggaaataaaagaggatacaaacaaatggaagaacattccatgctcatgggtaggaagaatcaatatcgtgaaaatggccatactgcccaaggtaatttacagattcaatgccatccccatcaagctactaatgactttcttcacagaattggaaaaaactactttaaagttcatatggaaccaaaaaagagcctgcatcaccaagtcaatcctaagccaaaagaacaaagctggaggcatcacactacctgacttcaaactatactacaagcctacagtaaccaaaacagcatggtactggtaccaaaacagagatatagatcaatggaacagaacagagccctcataaataatgccgcatacctacaactatctgatctttgacaaacctgagaaaaacaagcaatggggaaaggattccctatttaataaatggtgctgggaaaactggctagccatatgtaggaagctgaaactggatcccttccttacaccttatacaaaaatcaattcaagatggattaaagatttaaacgttagacctaaaaccataaaaaccctagaagaaaacctaggcatggccattcaggacataggcatgggcaaggacttcatgtgcaaaacaccaaaagcaatggcaaccaaagccaaaattgacaaatgggatctaattaaactaaagagcttctgcacagccaaagaaactaccatcagagtgaacaggcaacctacaaaatgggagacaatttttgcaacctactcatctgacaaagggctaacatccagaatctacaatgaactcaaacaaatttacaagaaaaaaacaaacaaccccatcaaaaagtgggtgaaggacatgaacagacacttctcaaaagaagacatttatgcagccaaaaaacacatgaaaaaatgctcatcatcactggccatcagagaaatgcaaatcaaaaccacaatgagataccatctcacaccagttagaatggcgatcattaaaaagtcaggaaacaacaggtgctggagaggatgtggagaaacaggaacacttttacactgttggtgggactgtaaactagttcatccattgtggaagtcagtgtggcgattcctcagggatctagaactagaaataccatttgacccagccatcccattactgggtatatacccaaatgactataaatcatgctgctataaagacacatgcacacgtatgtttattgcggcattattcacaatagcaaagacttggaaccaacccaaatgtccaacaatgatagactggattaagaaaatgtggcacatatacaccatggaatactatgcagccataaaaaatgatgagttcatgtcctttgtagggacatggatgaaattggaaatcatcattctcagtaaactatcacaagaacaaaaaaccaaacaccgcatattctcactcataggtgggaattgaacaatgagatcacatggacacaggaaggggaatatcacactctggggactgtggtggggtggggggagtggggagggatagcactgggagatatacctaatgctagatgacgagttagtgggtgcagcgcaccagcatggcacatgtatacatatgtaactaacctgcacaatgtgcacatgtaccctaaaacttaaagtataataaaaaaaaaaaaaaaagaaaatacactggttgtccccaaagcggagggtgtccccaagttggaggttctccaaaatacaaaatgtttcctgcgacaaaggagaacagaagaaagcagctatctcagaaggggctctggaccaggcaygatgactcacgcctgtaatcccagcactttgggaggccgaggcgggtggatcacctgaggtcaggagttcgagagcagcctggccagtatgacatagctccatctctactaaaaatacaaaaagttagctgggcctagtggtgcatgcctgtaatcccagctactcgggaggctgaggcaggagaatggcttgaacccaggaaatggaggttgcagtgagccaagatcatgccactgcactycagcctggatgacatagcatgactccatctccaaaaaacaaaaaaaaaaaaaaagaaagaaagaaaaagggactatggagtacaaaggcccatgtgtcatttcccataatatttttcatatttttgttttattttttactgtgtatatttaaggtctataacatgatgtatgggatacatagaagcagtaaaaggtcgctrtagtgaagcagattaagatatccaccttcatgcagttacccattttttttctagcaagaacagggaaaatctactcacttagcttgaatcccaaatataatacaattgtactacccatagtcctcatgctgtacattggagttctggacttgttcatcctgcatatctgctactttgtgtcctctgacctacctgtctgcattttcttccctcacacctgtctttggtaaccactcttttgttctctatctctgtatatttgaattttttttagatttcatacataagtgagatcatgcaatttttccatgtctggcttttttctttctttttttcttattaattttttagagacaaagtctcactatgttgtccaggctggagtgtgatggctattcataggtgctatcacagcacactgcagccttaaactcccaggctcaagtgatcctcccacctcagcctcccacgtagctgggactacaagtgtgtaccaccacacctggctctggcttattttacttagcataaggtactccaggctcatccatgttgtggtaaatggcaagaccttattattttttagggctaaataatatttctctctctctctccctgtctctctctgtttctctgtctctttctctgtgtgtgtgtgtgtgtgtgtgtgtgtgttgtgttgtccatcatattttcttttccactcatctgttgatggacacttaggttgatcccaaatcttcacaattttttgaatatgctgcagtgaacaaaggagtgcagatatctttacaaggtgctgatttcatttcctttgggtatatgtccagagaaggaattgctaggtcttatggtagctctatttttaatttctagaaatttgatagttttaaagaaaagttgcatatatgaatgttatcaggtcttgaatttaaatgagcaaataattttattttctttgtttttgtctatctgaatttaattctatcctgaacccacatctgtttcttgaaggaaatttggtcttgtaacttctaggtaagcttagtgacttttgttgtttttctcagtaaatttggagtttaagttctgttggttcagcattcttttcctttcctccacagaatgacattgcaaaggtagatgatatacagaacactcaggcataggtaagggagaggcttcggacccacagccatctcctggagtacattgagatgtgcttgtacccttttggtcaactgctctcattaccattacattctccaagatgtgtatgaaactgaaatggcctcatgccttttatcccaaccatcccaaagctccattggagacttggggtctgtcagtcacttctatacctatccctgggggagcaggaatttcaaaatagtctcttgcgtctttagaggatatagtatgaacctgggttttaaatggaggtgctatsacacacaggtccattctcctaacattcctacacaaagattatggcaccaatttggggcatgaagaaattctttacaaacctttggactgccccttagggctgagggaacatggctcaggccatttccatcatcagatcttctcaaacatatgtggagttcccactgacctctcaaccctcccagcctcatcccttggattttatctagtggtatggagtacaacctggctaagtattgggaacctgaatcaggtatgaatctcatccttttctgaggcttctccttccccagcaggagcaaatttggtttaattaatgggttagatccattgtttcttcagttttcttttatatgtgctgtttctggcataaattttatgctgggctatatgtaacacatgatttgagatcaaacatgtctactgcaaatcaaaagtcttggcttttagagagaattgtctctgctataagtttcagaagtttgttttggaactcaaagctaaaaattagaatttttgttctatatgcaccgtttggtgttctccacttaacaaatgatcctgaagcaataaaatgtattgattcactgtggagaagaagaaagttacgggagaccatttataaatgatgagcaaaattcttaatacatttaaagttttatcacctcaaacattttccaaacaataggatatgagtagttgtctctgaatccatacagttttcaaatcagaggaatgacaacatgagatttaatataacatagaaaaacagggacagatttaaaactcatcaggtgtttgtttatttgttttttgggttcgtttagagacagggtctggctccgtcacccaggccggagtgcagtggcgtgatcatagatcactgtaatcttgagttcctggactcaagtgattcttccaccctagtctcccaagtaggtgggactaaaggtgtgtgccaccatgccttgctatttttttgttttttaagagacagatcttcctatgttgtggaggccagtctcaaactcctgccttcaagcaatcctcctgtcttggcctctcaattgatgataagttttctaatcagatttagtgcttttctggaaaaatcattagacaacaattctgaagctaaatattaagtgtgtgcctaaaaatttagcaaacttaatggaagaggtcctcagaactcttttaagatcaaacagttcaatactaaaagtaaaaatttgaatggaaaaagagggtgtggggaaaccaaattacctatcctgtatgcatattggaggtggaatgaacagaccaggggcatcatgcaaaattctcaggcgccaagtagagtgaataagtgtgtggtaattattcacagtgtcaatgcatacaactgaaaataggatcagtacttaaatgctggatataatatattatcaggtcaagactcatgacctgataaagaccatctgtatgtccttaaatgtccttaaatgctagatgtaagcttggatatttgtttatgtttatgtgaatgacattccttctttcttcctgggtttttgtccctcttttattttgttctgtttatggagatgaagttctgcattagataggatcagtgaaatataaacatagatttgtgagcgtataaatgagactacccaaaacatttcccctcaaattaagactttatattttgagacacactggaatcagtgacgtcagtttggaagctcagattttcctagcaacaaatagtgtggcttagacagaacgtcagtttcaacagtgaaattcattgataggttctttgaatttaactcagtggctcaagttcagtttggagtaatgccggaggcatgtctttgccctaagaatagtctatttcctcacacctgaaacatattcttatctcctttcctttttttctccagactgttcaaaatctgtcctttagctgcaagtctaaacaacaaccaattctagaatatagttttctctaaacgttcattctgttgaaatattttagcgagttaacacttaaaataaaacttgctctgaggctttgaaaagtgaaagtggacgtctgtacagataaagtatcaagtttattactatcatgtaaaattttacagtcagtgattatttcctttggaataagatttatgtacttcacctctgaggcaagacctcatattcagctgtatttcaaattctgtttttcacatagatgcacatttcaatatgttaatatgtaatttaggaaacaatttggttgtctctaataggattataaaattctctctttcatgtacacaatgcaggttgagaattttctcagtggacatgaatttttttaaatcattaccagaaaagtctcaagtactttatgcctgtcttctaaatcaattcttaataattttccaagtgaaaatccattatgattagcttgacatctcatacaaacaactgtgtcaaaatttttttctcccagtttacccccactgatgtagttcagttatatgaactgctgtttatattagatttgagaagggttctgacttgtgttctaaccataccaaaaagaaaattagaactttttataattatgactttatggtttagttccagtttgtttatttcttattttttatttttataacttcaccttttattttagattcagagggtacctatgcaggcttattacctgggtatattgtgtgatgctgaggtttggggtcctactgatcccatcacctaggtactgagcacagtaccagtagtttttcaattctcaatcccctccctctctcctcgctttagtagtccgcagtgtctgttgttaccatccttatgtccacgttcccatctttatgtccatgtttagttcctacttatcagtgagaacctgcgatatttggttttctgttgctgcattaatttgcttaggataatggcttctagttgcatccatgttgctgaaaaggacacgctttcattccttattatgactgtatagtattccattgtgtatatgtaccatatttgttttatccaacccccttaatggcacctcggctgattccaygtctgtgctattgtgagtagctgcaatgaacatacaagtgcgtgtgtctttttggtaaaataatttattttattttggatatgtacccartaatgagattgctgggttgaatggtatttgtaaattctttgagaaatatccaaactgctttccacatagctgaaaaaaattacattcccaccaacagcgtataactgttctcttttctccacaggctcaccgacattggttgttttttgaccttttctctcttttttcttttttcttttttttttttttttttgagatggagtttcagtcttgttgcccaggatggagcgcaatggtgcaatctcagctcactgcaatctccgcctcctgggttcaagtgattcccctgcctcagcctccttagctgggattacaggcatgcaccatcacgcccrgctaattttgtatttttagtagagacatggtttcaccatgttggccaggctggtttcaaactcctgacctcaggtgatccacctgacttggcctcccaaagtgctgggattacaggtgtgagccataatgcccggccatttttttaaccttttcatagtagccatcctgactggtgtgaggtggtgtatcattgtgggtttgatttgcatctttctgagtgatgttgagcatttttcatatgtttgttgaccaattgtatgtcttcttttgagaagcatctgttcatgtattttgcccatattttagtgggcaaaatatttagttcaattgcttaagttcawttcttttgagaagcatctgttcatgtattttgcccatattttagtgggcaaaatatttagttcaattgcttaagttccctatagattctggatattagaactttgtcagatgcatagtttgtaaatatttcctcccattctataggttgtatgtttactctgttgatagtttcttttgcagtgaagaagctctttagtttaattaggtctcacttgtctatttttgtttttctcacaattgcttttgaggactcagtcataaattctttgccaaagctgatatccagaatggtatttcctaggttttcttctaagacttttatagttttaggtattatatttaagcttttaatccatctcgagttaatttttctatatggtaaaaggtaggggtccagttttattcttctgcatattgacagccagttatcccaacaccatttattgagtagggagtccttttccgattgcttgttttgtctactttgtcaaagatcagatggctgttatgcagctttatttctggattctctgtcctgtccyattggtctatgtgtctgtttttgtaccagtatcatgccattttgattactgtagccttagagtatagtttgaagtcaagtcatgtgatgccaccagctttgttatttctgcttaggattgctttgtctatttgggctcttttttggttctctctatattttagaatagttttttctagttctgtgaaaaaataatgttggtagcttgatataggaatggtgttgaatctgtagattgctttgaacggtatagtcattttarcaatattgattccatgagcaaggaatgtttttccatttgtgtcatctctgatttctkttggcagagttttgtagttctccttgtaaagatcattcacttcttggttagatgtattcctaggtattttatttatttatttatttccagctactgtaaatgggattgtattattgattttgttctcagcttgattgttattgatgtatagaagtgctactgatttttttacattgattttgtggcctgaaactttattgaaattgtttatcagtttcagggcccttttgaaagattatttagggtgttctggatatagaagtgtatcatcagttaagagagataatttaacttcttcttttcctgtctgaatgatttttatttatttctcttgcctgattgctctgtctaggactttcagtaatatgttcaacagcagtggttaaagtgggcatccttgtattgttcctaccttagaaaaaaggctttcaatttttcgctgttcartttgatgtaagctgtgggtttgtcatctatggcctttatgttattggggtgtatttcttctataaccaatttgttgagaatatttattatgaaggtatgttgaattttattaagtgccttttcagcacgtattgaaattatcataaggtttttgtcctagattgtgttcatgtgattatgacatttactgatttgtgtatgttgatggctcaagcatgttggatgcaacatcctttcatccctgggataaatgctacttgatcatggtgaataatctttttaatgtgttgtttgaattgagtttctagtattttgttaaggattttagcaactgtgttcatcagggatattgcccagtagttttctttttctgttgctatgtccttgtctgctattggtatcagggtaatgctggcctcatggaatgagtttgaaagtattccctcctcttaaatatttgaaatagtttgagtagaattggtattagttcttctttaagtgtttggtagaatttattagtgaatccatcacgtctttggattttctttaatgggaggctttttattattgcttcaatcttcttactgtttcttcatagttcaaccctggtagatcatgtgcatccaggaatttattaatttcttctaggtttttcaacttgttgcatatagctgtttawatagtctgtaattatcctttgtatttctgtggtatcagttgtaatattcccttttcagtttgtgtttttatttatttgggtcttcttttttcttagtctggctaaaagtttgccaattttgtttatctttaaaaaaaccmcagcatttagttttgttgatcttttatatttgttttattctcaattttatttatttctattctgatctttattctatccttccttctactaattttgagtttggtttgttcttgcttttctagttccttgaggtgcatcattaggttttttgtttgaaatctttctactttctacttttttgatgtaggcatttattgccataaactttcctcttgcactgattttgctgtatcccataggttcaggtgtgctatgttttaattttcatttgattcaagaaatttttaaatttccttcttacattcttcattgactcactggttgttcaggagcatgttgcttaatttccatgtatttgtacagtttccaaagttccttttgtaactcatttctagttttattcccttatgatcagaaaagatacttgatatgactgcaacattttaaaagttgttgagaattgtttgtggcctaasatatggtctatcctggcaaatgttctaagtgctgatgagaaatatgtgtatgctaaagtagttgaatgaaatattctgtaagtgtctgttaggtccatttggtagactatagtttaactttgatatttctttgttgattttctgtgtagacaatttataggttcctttcgatcttggactgttactaaaaagatgcactgagtataattatacataatttacttcatacttattyaaatacttttggagattaaatttccagaaatgaatttcgtaggtcaatggtgtttatctttataactttggtagctattgctcatttattttcacagaggtgcatcacattatactctcaaagtaatacatgggagttagcccttacccacagtcacaccaatagagtacataatcagacttttgtatttttgtcaatctgagaggtgaacaatggtatcgcaatgtagttttaatttgtatttatattattagtaactggagagattttctttttaacttttaagaactacttgtttttcttttctgtaaaaggtctattcgtatcctttggccatttttcttagatttttatttttgccttattgatctatatgtactcttgtactagaaagattaaccctttttaatatgagctgcagaggatttttaaaaaatatattgttgtttgataggactttctcttctgattcattggtctatagagttgatcctgagtttctctagctttattaatataatgagttatatattgttttttagagatttcttaatattatttgttttcccaaatgacattagaatcagcttttcttcttcccaaataaaaatctatttttactggtgtgttaggcttttctcacattgctataaagaaatacctggtactgggtgatttacaaagaaaagaggttcaattggctcgtggttctgcaggttgtacaggaagcatggtgctggaatctgcttggcttttgtagaagtgtcgggaaacttacaatcatggcaggaggcaaatggggggcaggcacctcacgtggcaggagcaagagagagcaaggaatgagatgctacacgcttttaaacgaccagaaatcacaagaactcacacactattgcaaggacagtaccaagagggatggtgctaaactattcatgagaaatccatccccatggtccaatcaacttccaccaggccccaccttcgacattgggaattacatttcaatatgagatttgggcagggacacaatccacattatatcaactgagatcatattaaatttgtgcatcaatttaaggataattgacattttcttaatattgaatattgttcaagtatttttattgttcaggaatgcaggtcttgaacacttttttggtaatatatctgtttgttgcaatttagatttcagatatttatttcttatattaattttccaccagactaccatactaaagtatctgaatatttrtatcaaataaaaaaattatgtaacttgaaagtacagtagtaataatttacatcttctttcctatttttatatctgccaaatcttggtattaacgaaaattacttcggtgttgctaaatcagagtttgactttcaggctgaggttgctgtatttcattacattaagtatctttctactattgttttctttagattttttaaaacttaagaataagaatgtcgtaaatgtctttacagggtttaaggagataatcttatttttcctttagctttattaataaaatgaattgtatattcayaaatttgctagtatagacccatttttgctctatgtgaaccctrctgttcataatgtgttgtttaatatgctgttagaatctgtttgcagtattttatgatgtttgtattaatatttttaagactgaatatgtatgcaatcctaacctagtttaatattaatattataatagcatcacaaaaaatgataatatctcccatacctcttttttgatttggtttttgttttctatgcactgagctagtttaaatagcattggaattatctactaaaaagtattgatagaatttccccatgagattaccttcttttgtgagttttagatgtttaagtcttttctctatttctcctattaaaatctattagtttccattttgttccttgctgggattaggatgaataagtaatattctcccaaaaaattattcawttaatytagatttgtcaatttaagcaatgtctcttttatgatgtgcttatttttccctattttgtgaatatcyttctgcatatgtttttcttttcatagctttaccttcttatgttttcttgatcaattggtattcctctccctcaccacaacaaacttgacttatgtatcagtgtaactgtcattttatgttttctaactattaatttcagcttttttctttgttaattgcataccgctgctttattttagatttgtttcatgtacttttataacactttttagtcttattattgatttatttgttttctttctaattttaaaattgatctacagtttaaagctatgaattgttctctctgcactgttttggcaatttcccaaaagtcttgatctggagcttttaaaaatcattcttataaaggaaattttaccaattcagtatgtatttctctttatcctaaaagtaatttcagatcaatttactttaaacttgccaggtaattgagtcttttcattttctgagttttttattgattgttagtcttattggattatactcagataccatggtcagcaatatatactttttggagatattaaagattttgtatagttatagtcaacattttatgagcatttcttttgaaagctataatctttatttcaagtcacagcgttaaacatttatgttagatttaccatcttaattgatatatttgtccccttgatctgtcatggacttaggttaataaaacttctgccacaggatatttctctctccttatagtctctgtaatgtttgctttatgagtgttggtgtggtattgtgttatgaacagcaattcataactgttttatctttactgtgaatttttcaaattattgacaaaactatcaagtgataacagattaggtagaaggaagaggaaagctgctaaatctataattgttcaaggaagagaactaatagaatraagaaaaagaaaaatttaaaaccttaaatatcaaaataagtactaaataaaaaatragtaaattactcaaaaaaaaagcaaatcatctcatgttgaaagactttttaaaaaagctttagaaatagaaaatatgacattaaatgacattgaattaagaccagacatatktgtcaaagtaataaatatcaataggtttaattcacatattgaaagataaagtcatcagattgtactacraagcaaagacactcaattaaaataaataactcagaaaaaaattgaataaaaggatgagcaaaagtataartagaaaatgtaaaataaagcaagatgcaatctttatatatgacaaaatggaattcagaccaaaaaaaaatgatgagggatacttttgtcaataattttaactttcttgatattcmctttgtattcttagatttgattatacttgttttacctgatctatcatgtttaaattatggatagtgagtaaaactaygttaactcctctatttgtttagttgtttatttttacactttcacatatcatttcctatttactgttaccttaatctccacatttgttcagtctcagtcctataattaaatatattcgatagtcacaatatgtcattttgttatagtttcaccagtcatctcttggctgacttaagttctttttccagtaatgaagaattcatgggaaaaatattagctgaacacttgcttgatcaataccagtaaaacttatacaatttgacttggtcaaacatagcattcatgtatcatgtttttttttctctgagtattgtacaggtatttctatattagtctctgtcattgaatggttgcatttgatacatttgaagccaatctgacatttctttctttattctgacttaaccttttttgagtggaacttcagttttttctctatccttaaaatccaataattttaataggcagtaaccaaaattgaccattctgagttaatcgctcccaactaactcagaggatgttgcattttttcaatgtagattcaaatcatttttatttcctcaaagttgtcttgaattataactttaaaaaatattcttctcaggcttttcttctttggaaactcattttgattatgatagaacttatttatctgcttactaaatttgtcattttctctctaaactattttaaatatatctttttgtttattttttctcacaactatcttttgtcccttgctagtttttccatagtatcctgcctttcttgaagtttttcaaatcttttttcctttcttttatgtgttttgtttttcttttctagttctttcctgatttctgcatgctcattttcatccctcctattgttaagatatgttaatcctattcctacatttttacttggctttttccaaacgcatggaatattatttcattaagcttctgttgttttctttatgtattcattttcattacatttctcatccactttcaggcaatcttttcctcgtgcatatttttcatctgcttgtagatttctcccatttttcatggaaaatctttgtgttggtgctatacccagttcttttttcattgttcgtcactgaatgtgttgaattttcctagattagcaatttgggggaggtacctaagcaggaggctaggggagaaaggatacagtagcccttcagatttttcatttgctcactacttccatcccttaggggtcctgttgattctttctatggatgtgcctcctttttctgcaggatacataatgtaaccactgctctgaaaatggccctgctctcttgtattctatacccttaattgtatcaagggtgtagcttttggaattcaaattgggcaccttrtttttactttagataattttttttttaaactggaacttcagtagatattccatcgcttgagcttttaccattctgctctgacttttttcagttcctcctatgcagattccacccaatatcatcaatataggcagaagaaccattggggacaaaaagagaggattattaagtttctcataatgaattacttgaaacgagagaatatatattagaaataaggtttcaaaggtatgcctgggttggtacactatgaattttaataagttagaactgtatgatatttttaagtgatggattttaaaaaattaatcatttgcataattaatcagactctgctaattaattctataaaactatatgcaaaatgcataaaatatttttgaaattaaaatttggactaataaagaggagttaaaatgataattagaaactttctttgatgcaacaacaatatgtgctctttaagaaaaatctggaaaacataggaataaagcataaattaaaatatttaacattttggcyatagttaaatataaatgcatacatgttattgttttaaaactagaatcacactcaaaatattgtgatctctattttaatctttttgtatatatattcttttaaataggatttttataatggctgcagagtatctcttcatatgcaaaggtgtaatttgtttttatcagttctccattataagatattcagatggtttcgacactgaaaattgtattgtgttaattgtcctaatgaagcaggatatttccctgaccccttcgcggaattcctgacaggggtgcctcatttactcagccccgctcgctgctytcagctcctcgcgggagggagtgcacgagcgaacgagtacgggagctggaatgaatgagtgctggaatcggctggccacttggcgctggtaggacccaaccccactcactcggacctgcagcgttccacccctcatgggagggagcgcacaggtgagcaggtgtaggaactgaccccacrctttagaaccggcaggattgaactccatgcaggccccacagcagactccaaccgggggtgcctgcgactctcagagccccagagggcacgttacagtgctcttttagctctgctgtccgcagtcckyagtccgcattagtgttaatagctcagtggggcctctgacttttcacatgaggcggctgccttccaccagccagggtgaagagccagtgtgacagccagactcttctcgaagttacgaagttacgccaccaagctgtccctctgaagtcaagccacttctctcckatgcccagctgtatcctgtctactggctgagtctgggattaatataggcacaggatggggcggggtggggccatgagtggtttaggaaaaagcaacatttgagcgggaaaacagggatagaagttctcactttgggctgtggtttcaggcttttcagcttgagggtaggaattcctggggacctactcttttctgcctagattttctgtgcctgctgttccctatcactaatacacaaatcttggtgtacttcaaatagtgtaatccaaatagtgtaatccaatttagataaattggaaggagtaaaatttctgggacagaaaacaatgcatatttcccatatatcttcttaaattgtcctctagaaagattttattacttatttattatcattattcaacagtggttgatttccttttctttgaatctttaatgaaaatatgcataattttaagtcattttgtatatttgatatataaaatatggtctcatctttacattatagtgtgaaacattagtgagattgaggtgtttttgtttgttttgtttgcttctcctgaattcatggggcacagacatttctcctttataaactgcctgtccctgctctgtagctgggttgctcttggtacattgtcctttttctatgtaaaaactcttagtgaaaactctttcatatgggacaaatatcacttctcttccccatctctggtttgccttgcaattttgtctgtctttttaatacagaattttaaatgtttataaatctgttggtatgttcctttgaattttcttctgttttatacttagaaatttctgttttgaaaatcatgagtatgtaaatataattttttcatttttgcattttggaaatgtcataattaagaggtgataattgtgacatgatctgaggactgtttctgtatttaccgtcatatctcatttgtctcactgatgtttctttactagaattagtctcatttatgtactgcattttataatatgcaatattatcatataaagcatataagatactattacaagataatatagcatattcctcactatacttttctattctatataaattttaaaacattttgtcatctcccaaaaaatagtgtcttggaatttttatttggacatcactaaaactaaaatatttagggataattgatcagaagcaacatgatatttctctttctaaattttttatatttttctctaaattgttttatagtctttttyatgtaatatatacacacacgtatgtgattttccctatatattttgtattttatgtctggcttattttacattcttttttttttttttttttttgagatggagtctcactctgtcacccaggttggagtgcagtggctccatctcggctcactgcaacctccccctctgggttcaagcgattctcctgcctcagcctcctggtagctgggactacaggtgtatgccaccacgcccgtctaatttttgtatttttagtagagacggtgtttcaccatgttggtcaggctggtctcaaactcctgacctcatgatccacccgccttggcctcccaaagtgctgggattacaggtgtgagccacagtgcctggccaacattcttattaacaatatgaggccaggcgtggtggctcaggcctgtaatcccagcactttgggaggctgaggcgggctgatcacctgaggtcgggagttcaagaccagcctgaccaacatggtgaaaccccgtctctactaaaaatacaaaaaagttagccgggcgtggtggcacatgcctgcaaccccagctacttgagaggctgaagcaggagaattacttgaacccggaaggcggaggttgtggtgagccaagattgctccattgcactccagcctgggcaacaagagcaaaactctgtctcaaacaaaacaaaacaaaacaaaacaaaacaaaaacaatatgaaagcaaccaatttcctttaaaagtatttttaaaactttcaacaattgtatgggctttttgggtacatttctctttagagattctattgtgaaaatattgtattaattgtttgacctttttgagcttttagcttaattttaaaataaaaactgcttaatatttttgttcattttatattaaataaaaaccggtcattaactataactcttaagttgacatttcacacaaaaataataatagagatggatagatttttatcctcattcttttaattataaatattaattaccatatgataccagatagtattttatctgctgaagtatttgatgacttatattacaaatggctttataatgcaggccccagatttctaaattagtagtgtttatttttatagatcaaaatatcatgtccagtcacagtggctcatacctgtaatcccagcagtttgggaagccaaggctgatgaatcacttgagctcaggaactcaagaccagcctggccaacatggtgaaaccctatctctactaaaaagacaaaaactagccgggcatggtggtgcatgcttgtagtctcagctacttgagaggctaaggcacaagaatcgcttgaacccaagaggcagaggtggcagtgagctgagatcacgccactgcactccagcctaggcagcagagcaagactccatccaaaaaaamccccaaaaacctaatgtttttatttatattttagattagtgggatggtttggccatgaactcagcaccagatttaagatggataacagtaagtgtatttattttacctaatgtcatttttattttaactttatttcaatgttcatctgtctttgtattatgtgtaatgtatatgccccagggagagtgcacttcaaaaatgtcactgagaattctcaaataagaaatgacatttccagagtgtaagactaagagtttatagattttagcatgattttgagtctatcccttagcagggagataaaagaaaatgaagtccaaggtaagggtcatgtggcttggtcaggtgccatcaacatagagtgcctgaaacactgggcatggaggacaggaggaaatttggggcttggagtcagatccagaaagacctgggtgttaatcacactttgctgcttaatagttttttgatcctgcacaagttatatcatcttgtgtcattgttttttctttcccacttatctaatgtgaataataaaatctatttaaagatttggttttagggttagtcaagctcaaaacaataagccmagtaggacacagcagtaccttaataaatactcattttcactcctcttttttcctattttccttttgtggcttttgccatgtaccaaagagtgtagcaattcctgtgagcagttaaccccagcagatagaagtgaaactctaccatgcagagcttccttttcctgcatgacctcatttctcaatcacatgggatgcagaaagatcatacgtgctttgagagttcaacataaacttgatccttcagattgctttaaaccctgagatactgttttaaatttgttttcattttttattgactttatttttttgtttttgaaacaaggtcttgttctgtcacctaggccggagtacagtggtgcgatcaggctcagttcagccttgatattcctggctcaagcaatcttctcgccttagcttcctaagtagctgggactagaggtgtgcaccaccatgactggatgatgatgatgatgmtkattattattattattatttagtggagatgaggtcttgctatgttgtccaagctggcctgagataatattttatatatataggtgctctttgacttacaatggggttatttcctgataagcccatcataagctgaaaatatcataagtaaaaaatgcatttaatacacctaatctatagaacatcatagcttagcctagcctaccttaaaacacattcaaaacacttacatagcctagagttgggcaaaaccatctaacacaaatcctattttataataaagcattgaatatattatatgatttattgaatactatactaaaagtggaaaacacaatgggcgtatgggtagtcgaagtatggcttctacttaagatgtactgcttttgtatcactgtaaaattgaacaattttaagtcaaaccattgttaagtcagggaccattggtatgcagatttgtagcaaccaaattgcaaaatgggatattccagtcaagtcaggatacctgtattttaccttggctgctaaaataattagatctgttattataccagttatttaaattctttgagatgggttttcttatttggaaataaaggaattgaatttgatcaggggtagcaaactttttctgtgaaaggccagataggaaatattttaagctttctaggctatacagtctctgtggcaaatactcarttccgtcattgtggtggtaaagcagccataggtgatacataagtgaaagattgtggctatgttttcataaaactgtattttaaaaagcagggcctggcacgaagactcacgcctgtaatcccagcactttgggaggcaaggcagatggatcaattgatcacaggagtttgagaccagcctgggtgacatagtgagaccttgtctctataaaaactacagaaattagccaggagtggtggtatgcatctgtagtcccagctacttgggagcctgaggcgggaagatcacctgagcccggggaggtcaaggctgcagtgagccatgattgagccactgcactcaggcctgggtaacagagtgatactctgtctcaaaaacaaaaacaaaactagtgggtcaaatttggcccacaggccatatggccatatattagtctgttttcacactgctataaagataccacctgagactcagtaatttgaaaaggaaagaattttaattgactcacagtttcacatggctggggaagtctcaggaaacttacaatcatgtcagaaggcaaagggaaagcaaggcacatatgaggtgatgggaggtgagagagagagagaaagagagagagtgcataaaaactgctgtttttggccgggcgtggtggctcacgcctgtaatcccagcactttgggaggccaaggcgggcggatcacgaggtcaggagatcgagaccaccctggctaacactgtgaaaccccatctctactaaaaatacaaaaaaattagctgggcgtggtgrcaggcacccgtagtcccagctactcggaaagctgaggcaggagaatggcgtgaacccgtgaggcggaggtttcagtgagccaagattgcgccactgcattccagcctgggcaacagagcgagactccatctcaaaaacaaaaacaaamaamaaaaacaaaaamaaaaaaaactgctgtttttaaaaccatcagatcttgtgagaactccttcactatcatgagaacggcatgcaggaaactgcccccatgatccattcacctcccatcaggtcccaccctcgacatatggggattacaattcaagatgagatttgggtggggactcagagccaaaccatatcaccatagtttgcttaatcctggatttgataactataaaaaagtcatcaagttttaacattcttttagtcagtcatagtgttaacttatctctgactagctatcttaaccctattgaatttaacttgctacagttcaatctgcttaattctaattagtagagcatctgttattaatttaccttttttatatacttaggcagatcttttttttaaagctccctctattgtgtgtgtgtgtgtgtgtgtgtgtgtgtgtgtgtgtgtgtgtgtctgtgtgtgttctgtaagagaaaccacttgacctaacaatcctagagctaaaagtcascttcataggtcatttcattcatatttctgcctttgggagacattacaattacatgccactaaaagctgatgctctctctcattgacatggtttcataatagaatagcaaatgttgagcagaataaggaatcctggcttgggaataggaaggcagagaatgagatccagaaaaacttccagaagaggtcatttttaccttgggtctaagatttctggtgttctgctaagaagttggggacaagggaggtgggaactgctggtaaacgggaaataacgtcgatattttagttccatggagcttatcttaaatatctcagaaatcctacttaggaagaaaagtttaagtcttgctcttttactctccagtactctagtatctttatggacacttttaaagttaccttctatgataatgacatgataytaatttctcagaactgcagttaatccctggggtctgtggattccgaatttcaaatcctcccattttgttggtctgttccttgcatgctagtttagaggtaagtgatgtgtgtttcaaccttcccacatctttgcgttttttcttgatctgtttgtgacaattcatagtactttctctgctacacagcaagatgatacatgtgcactgtgcatgaacaaggkacagaaggcagcattcccctttaggacagtgatgatgtggtgagggtctcccttcattcatgtcaccagcccccagcacaatgcttggcacattgttggcacatagtaaatattaaatggaactcttttggggagatacgttttttactccacttagaatctgtttaaacatgaataagttatttaaccttctcttggcctctctttataccaaataagcatgcaatatttagttcttcataaattcgctcattcaacataaatttattgagaaaatattgtgtgcctgatgtgattactagggactgtactttttctagttcattgtaggtgaatgaactgaccaagtaccatgtgacaaagctaggaaagacttacttgaaggaaaaaagaataatcagagtaaaccaaagattaaataaggttgtctcataaggtagggtggttttatgatttttttaaattgggacttctatgccattatgtccatttatagtctccactatcactgactcaatattttcctttaaattaatttatatttttatttaggtaaatttagtctcaccctgaaatgataaatatacataacaagaaaatgaaattgtgattccttagatactattatttagtgttagactaaatgtggccaagtaaaaatatataggttatatagtataaaattcatatataatgtaaatgtataaatatttacataaataatgtaaatatataaagtaattgtatattttgtatacctatatttaagtaaaatatattttaagtaaatgtgcatatatatttctaatagaagttttacatagaactattcaaacaaggatttgaaattttttcatgtctccttctaaaatcatgtagtttatgatattttggcaaaaacttatagaggatttcagcatcaaatgagtgacaggatgaagattcaaaattccttctaatctaaaattgcataattctgtgaacacttacagcagtttctcattctggccactggatggcagcatcaagttcctctgtttttattaaatttcaccactggatagtgatcatcacctcatttcattctgtctcaatttaaagcgcacctactcagtttaaccactagatggagcttgtgttgttttcacttcatggcagaatttttctttaacttggaaaatagacacagtaacgagatttttcagccagtgatatatatttttgacagttttttgagtaaaaatctgcttagtaaatcagataatgatatttgagttgtttttatagtatccattcagataaatattttgtttaaacattttaaaacaaaataaagtttctgcattcyttgcaagtttgtatcagcgagatgtgtgacaatatcagaagcaccaggacataccttaggaagagcttgtacctaaagtaatttcctctggtgcccatatctttgcaaataacttctcagacgtacctggaaatttccttttagacgccttcactttggcatactttctgcagtggactggcttttctagtagtattcacccttctcttgtgggaaaggaagcacattcctattcttccagccactgttttcctaccacactgtattagagtcacctagacaaagtttttattttcagttataatctgagaactgatttattttttctttttaatatctaaacttaaacctcagcctcctgagtagctgggactacaggtgtgcaccgctacaccaggctaatttttgtagttttttgtacagataaagtcttactatgttacccagtcaatatctaaacttaaaaccctaaaagccacaagaagaatgatatgcatttctctggatcttctaatcacttacatatttcccttgagcctctttctgctcatttcactgctgagactatgttctaaccaaaattatctttagttaatcaagccttatgttggtaaaagtgttttttcaaaattctttcctactgtaaattgcaaaatttttgaattacaaactaatgcattgaattgcttccctttctctgttaaaatgtcttattttctagacatttatgggtttctcatgtgagtaaacatcagtgaattaactatgcttctattaatacttaccttcctttaagttttatttatttatatttagagatgaggtcttgctctgttgttcagactggaatgcaatagtacgatcatggcttagcatggcctcaaactcctggggttcaagtgatcctcctgcccccaccttccaggtaactgggactgcaggactgcaccaccacacttggctgattattattatttatttattttatttctttatttttgagacagggtccccttctgtcactcctagagtgcagtgatgggatctcagctcactgcaacctctgcctcctggactcagttgatcttcccacctcagcctccacagcagctgggactacaagagtgcaccaccatgcccgactaatttttgtatttttttatagagacaggattttgccatgttgcccaggctgatcttgaactactggctgcaagtggtcctcctgagtagctaagactacagggcatgccactgtgctcagcttatttttaaatttttttagagatgaggtctggctatgttgtccacgttaatctggaactcctggcctcaagcgattctcctgcctcagtctcctgtttgaaatgtttgtttttcagtgctataaagaaatagcacttgaacgcaaatttaatttatttagtaaggccatttttacttcctgcagagaggatacactcgccagcagttttgccatgagagtacaccgaacaaaggagacagggtcatttataacctgacgtgtccaccctactgctgtgtccagttccaatggctggaatgggacctcccattctgtatttgtcccgattggctagtaacttagaactttttaaaagacgtaaaggtagagggtaacaaaggaaggagsaagtaacttgtggaatgctaagaaaggtaaaaacacttttaaataaggaagaggaacaggctgtgacctaatgctgcttggaccagtataagcatgccagggcaaatatttaggctaaattgtgggagctaaaaacataaagtatattgatttatttattacagctagcagatatttaagaatgttagcacaggtctttgaataaattttgcttctaagagaagttactatttattcctaattagacgggaaggaaagtctttgaagaggaacctctactttactttttatactcctaagcagttgggatgacagacgtgaaccactgcactcagccaccttatctttttaaaccagtttattccattttaggagataggtggttgaagtttcaataaacgaaagaagtaaatgcatgaatcaaactgcctctttgttgtctctacttttaagaaatattcaacacagtcaaatacgaactggaggagagattctatacttaagaatcaatcacatataaataagaccttagatttttaatgcaatgactttttaaaaagatattaatatggctttttttaataaatacatgtgtatatggttgattgatataaaaaatagcacattgtaatcagtttcaaactgtccttttgtttatatttttttatctgaatcatttatacaatagttcttaaaatattgtggatcaagggatgaagcctgaggccaggaacctggtggcaagtactctctccctcaatggacacgaagtgtgaccttacacaagcaacaactccctttggatgtatttgccttattttttaaagtaagatgtttggacaagattattttggaagtctcctcactttccaaaatacttaaatttaaacaatacgtatattatattttgagggttcatatttatgtgtagcgataggtagacaatatttagtccctttcagtattctgaattcataatgaaataaatggcttcaaaatacaaagttagagcattcaattaaaatacatggcgagtcagaagactcaacaaagaaatgtactatacgtttcctttcaaatttcctagagagacagttttaagaatttaagagaaaaatatgacaattgaaaacatcacaccaaacttatttttcctgtttaaacttatctagcttttcaagctttgtgttcattttgtcagtaagaaaaaaaatacaagtagttgaaactctgcaaagtattatcttctaagctgaatatttttcaaaccacagttttcattttttctaatttaaaaaaattattttctcaatattgaaagcataacatttatgagaagcaaaaaagaaaatagaatatttatgttacttccctattattctctctcaatatttttatgtgaagctcagaatagacttttaccctctgtgagatgaatttaaaagtgcctcagaatgcagttgcccttattgtggttgtaatggagaaagtaagttttatatttaaaagttattttatgatttaaagagtgttaacattccacagtatattaagatggaagctatttgtcataccaaaaaaattggtttctagttatcaagagaaagcttcaagagcaacattccctacgcccctttaaaaactaaatgcaagtaatattcctcmaagttttactaacctatgcacacaaatgaactatcattaaatgtgatacttcacatatcgattgcccccatgtacatattagggcacccatagcataaccacaaaatttcctagaattatttattatttagaatttcttagaatattattaagctccagagagaatcttggaaagattcctcacatagtctttttattccaaacttcacagccaaaccagctgtggcccgtgccttgcctgtccctgctcctctgggagaattttgattcttgtcccttgacccaaaacttggcagtgttcccttgagtcttcattatgccaagtctacctacatttgctttgcccaagaaaatgaaggagatgcctcctaccaagttctgtgtaacctgggtcatctgaatcttggagcactattatttgtactgcagatctctctcgggagcttatgaagccaagatatcagcctctacttgagctgtctctgtagacttcagacattgtctgggagttgtggttgaagagagagacaggcaccattctgtcctgtttttcctctcttgcttagatatcatttaccttcagtacagttcccagcctctccttcagccaatccatagcctctatacagtatagttccaggaaatctatggctgaatggtttgagttttattagagtgcctgcctacacatgccacgtgtacatacaggaataactgttttcatagacttgataaagtctcaatatcaccaaatgaccctatctttgctcttgatatctttgctcatgacacagaaaaggaacattaagtggcaggccagtgcatcacgctctgtttgcagttcatttagttcttatacataggatatatttttacactctacttgaccttaagagataagccagaaaagcacatctgttctgacccctaatattccaacaccagttattgtgtgcccttgtcactcatcttaatataagacatctcagcccacaaatggcagtattttcacrccagtgctagagtttagaaggggggaaatgagagaaaccaagcccaaatgcttcagtaaaaataaatgcattatctaatattatttgctttcctctctgaggaaacttagcattattatttaactgcttgttttcttattgttaaactggaagagatttgggagtcagtaaagcagttataaatatcaccagtaacactgctttacacatttgcacatgtttagatcatattgcacttttttgaggataaacaaactttacatcaaagttggaaaagtcttcttgattatgatttcaaaaagtggttttggggaaaagcttacattgtatgatatttaaatccatttattaaggtatgttttacttgattatactaayttaatttaaaataattttgaaggtatgttcccggaccaaattgagggttgggctgctatttctcatggcccaataacaagatgcagatgaacaggggaggaagagagtttttatttctgtaactggttacagggagaaggcctggaaattatcaccagaccaactcaaaattacaaagttttacaggtgtaagtgtgcattcatctgaagacataagtgattaacttcttttaatctacaactaaggtctgagtcctgaagaccttcctctggagcctcagtaaatttacttaatctaaatgggtccaggtgctggagtgattacccttatcttgtcttctgctaaatcactgaagtttgaggagttcctttagaccttcaataaacttgtttgtagaggcctggagagtttcttcacaaccacagtaaaacttgtttaatcctgaatgggtcctgttaagaattccttcattattctgtcatgctttaaggcccagggaaagcctaggcaaaactcttgataggcttttgttcatcccagcctttgtataagggcactgacttttttagtttttaatatttaaygtaaccactcggtcagtactgaaacagttgtgatggaggcctgcattagtgaaacctggcctgccacaggtacatgatattaacttacattttcttcctttgcaagttttatttaagtgacatttgtacaatttttctgtcatggaaattttaccttcagtatttaatagcaaagcatttaaaggagggcatgattttacacaaaaagattatgtaaagggagatatttattggaaagatcaaatatgggcatttcctttttatgcatgatttactcttaatttttgcttctttgtaaatcaataagacactttaatctgattgtttctcattccacagatctttaagcaagcgacaatgaaggcattgcggaaaaaatctgttttgctaactggctatctggaatacctgatcaagcataactatggcaaagataaagcagcaaccaagaaaccagttgtgaacataattactccgtctcatgtagaggagcgggggtgccagctaacaataacattttctgttccaaacraagatgttttccaagaactagaaaaaagaggagtggttgtaagtatgtcttgctttgctaccagattttgtctatgggccgcatgttagggataaaatttggactctttggtttattcattgttgcatgttatttcacatcagtcagtcaattaaggataaattaagtgccaactaagccctcagcactgtgctaactgaaaggcatagagatctgtcgtttctgataaaagagaagataccacaaacttggcttataggaatagttttttgtaacttactcattcttttcataacagtttgggcagaaaaaagttattatttcatcatactcagtcaggacattgttttctctagtctgtactacaattcatttattggatgaatggaattaaagatcataccaatttattgaagggttaaaaaagaaagtcttatttagtcgcttgatcaaattaagttattttcaaccttgtcacttctgtcaaaaaagatatatatacacttctcaggagtggtaacattgcaaggaataatttttttttaacccttcagcctatatgaccttcttggtctcttgaagagaactaataaatgtgaactgagtaatttcagggaaaaaagataatgtatctacttccaatgattatgtaattaaggcattgcttggctcatgtttacctgtaggagaggttactcccagatgctggagacacaagtcagaaattcaagtttctaaatcaaactctgctgtcgtcaaactctgtcctctttggaaagttcattaggatctattggcttgaaattttcatccrtatttggggtataaaataaattacctccaagagttgtgattggattgaaatgggacagcacacataaactatatactatattgtctagcctatagcaggtgttttctaaagttaaccatagtgatctctaggcatgtcaaattatctggtgctacttcaggacctacaatgtagcccacttcttatttgtgagatcaaagattagagaattaagttcaaggataatttactaaaactctccagaccctaatgaggttttcattcacttaaattcacccaagaattccagtccttccatggggtccccacgggaaaaaaaaaacaaaatgtatttatggtctattaaatgcttaaggaagatagttgctgaatagatttcaggaatctatcttggctatttatgcaccaatccattcttatttcttaaattattatcaagagaaaagtttcataaaacagaaaaacaccatgttttaaagtaaaaaaattttgcatatatattaatttttagggaaatcattatgaaagtgctttacataagtttatctggaatgtagattttcaacgtgtgaataatgctaacattattgtggctttattttttccccacagtgtgacaagcggaatccaaatggcattcgagtggctccagttcctctctataattctttccatgatgtttataaatttaccaatctgctcacttctatacttgactctgcagaaacaaaaaattagcagtgttttctagaacaacttaagcaaattatactgaaarctgctgtggttatttcagtattattcgatttttaattattgaaagtatgtcaccattgaccacatgtaactaacaataaataatayaccttacagaaaatctgatataatttttcagagtctgtggcactaaggagtccacagggctgcctaggtgctttgtgtttgggggaccaaaactgtgttggttcaagtattatctatacagtctctataagctgtcacatttcatggtcattgaaatgttttatgttggtttaatttctgatttaactgacaacttcataatgtatgtgcaattattgtgtcaaatttagaaatattactttagcttcaatttaccaaggagtttctttgaagcattgtagtctgatatatatatatatgtgtgtgtgtgtgtgtgtgtatatatatatatatatcatatatatatgatagtggctttcaaatttttttgggtacaatccacattgctcctgctgatctgtaatatcagaaaccagtatttatgtgaatatatgagaaatattattgattctaagatattttatcatattttaacatctttgaaagaggacccatctttcaattttcgatcaatagtttcttacagtcaccattggccatctttctcgttaccatctatgaaattagcatgcatctcaaataaacagttaccatcttctatttgataaaatagtctaaatagcaaaaataaaagtttttacaattatttgcctgtgctctaataggtactattctattttatctcataagaaatgttggaaactcattatattgatttccttacccactcatgggccctaattcacactttttaagaatgtttctttctttaatgttatcataatctcttactttttaaatgagaacttcccctaatataagagcttagatattatattactatgtttccatagtaaataaataaccccaagatctttttggggattagagatataagaaatatgtgctccatctcttgacatctttatctcaaatctatggacctttcttacccactgtgaaaaacctaaagttacacttagccctgttggacttacctagttttcaattgttgatgccacaatcattatttataagttgacaaaatagtgtagatttgtatacatagtcaacaaaaagagtgacataattattgcctccaattaaacaagtttgaatgaaataaacaaacttagataaacacttcggatggtagacgtaaacaataatatgtggaactccaacatcaacacctaccaataccagtaactactgatatttatcatgtacttaccatgtaccatgtattgtgctacattactcatgttatctcccttaattgagtggctacatactgctttagcaaatcttcctactgtaactaatcctcatagatggaagagttctcaaaaccttaaaactcatgcataagtggattcatatacatatataaaaatatatataaatatatatactttatatatatttatatttatatatttatatatttatattttaatatatttatataaatatatataaagtataatatatataaagtataaatatatatatatttatactttaagttcttggatacacgtgcagaacatgcaggtttgttacataggtatacatgtgccgtggtggattgctgcacccatcaacccgtcatctacatcaggtatttctcctaatgctcaccctcctcttatccccaactacccaaaaggacctggtgtgtgatgttcccctccctgtgttcatatgttctcattgttcaactctcacttatgggtaagaacatgcagtgtttgattttctgttcctctgttagtttgctgagaatgatggtttccagcttcatccatgtccctgcaaaggacatgaactcattcttttttatggctgcatagtattccatggtatatatgtgccacattttctttatccagtctatcattgatggccatttgagttggttccaagtcttcgctattgtgaatagtgctgcaatgaacatatgtgtgcatgtgtctttatagtagaatgatttataatccttagggtatacccagtaatgggattgctgggttaaatggtatttctggttctagatcctcgaggaattgccacactgtcttccacaatggttgaactaatttatactcccaccaacagtgtaaaagcattcctatttctccacatcctctcagcatctgttgtttcttgactttttaatgattagcattctaactggcgtgagatggtatttcattgtggttttgatttgcatttctctaatgaccagtgatgatgagttttttttcatatatttgttggccgcataaatgtcttcttttgagaagtgtctgttcgtatccttcacccactttttgatggggttgtgtttttcttgtaaatttatttaagtcccttgtagattctggatattttccctttgtcagatggatagattgcaaaaattttctcccgttctgtaggttgcccgatcactctgatgatagtttcttttgctgtgtagaagctctttagtttaatcaggttccatttgtcagttttggcttttgttgcaattgcttttggtgttttagtcttaaattctttgcccatgcctatgtcctgaatggtattgcctagatattcttctagggttttttttttggctttaggtcttgcagttaagtctttaatctatcttgagttaatttttgtataagatataagaaaggggtccagtttcagttttctgcatatggctagccagttttcccaacactatttattaaatagggaatcttttccccattgcttgtttttgtcaggtttatcaaagatcagatggttgtaaatgtgtggtgttatttctgaggcctctgttttgttccattggtctatatgtctgtttttgttcagtaccatgctgttttgtttactatagccttgtagtatagtttgaagtcaggtagtgtgatgcctccagctttgttctttttgcttaggattgtcttggcaatacaggttcttttttggttccatatgaaatttaaagtagttttttctaattctgtgaagaaagacaatggtagcttgatggaaatagcattgaatctataaattactctcagcaatatggccattttcaggatattgattcttcctatctatgagcatggaatgtttttccatttgtttgtgtcctctctggtatccttgagcagtggtttgtagttctcattgaagtagtccttcacatcccttgtaagttgtattcctaggtattttattctctttgcagcaattgtgaatgggagttcactcatgatttggttctctgtttgtcctatatacatatgttggtatataggaatgcttttattttaaagatggaagatgatgtctctctatgtaactcaggcaggtctcaaactcctgggctcaaatgatcctcctaccttaacctcctgagtagctgagactttagtcacacaccaccatgcctgaccaggaattgtttttcaacttcatagtggtaaacaaaacatatgtgttttcagttctcatggaacaagcagcttagtaggagaaacatatgttgaacttgtaagcagagaagtaaatctataatgacaaatcataatttctgaagggtattaattagatgtttgagtgaggggaaatattggaaggtgctcataagtttataaatgttctaaaatatttcatgctaatcacattaaaattatatcaaagtatataaacatatcatggaaaacataatcagcaccatgtactcaacacctaggttaaaaaatagcattaaaaattctctttccagctcacattctgctccctccccaaatccacagataaccatcgaattatattttgttttcttcattcccttactttctttaagttttacacccatgtatgtacccataaaaatctattagctaattttggttgtgcatgaatattgtatcaatgcaattatactgtatatattctgcttttgcacatatttttagattcatccatttgtggcatgtagctttccattcattttcactgctgctcagtattgtattacaaattttacatttgttttagggaagagtcataaaccatctttaagttctcctatgttacaagtaattttgtaaatgatgtgaggtggtgattctatttcattttttcccatatagataatttatattattaataattccttctatttcataagccaggtttctatatatctatataaatatagatatgtagatatatgaaagcaatatatatatggatgtctttctgggctatctgtactttcacactggctaatttgcttgttttttcatcaatacttcacttccttaattactacaacatagcagggcctggcatctgctagattaaatctctcagcttctttttattaagattgccctgaattgtcctggttatcctgggccccctactttttttatatttttgaatacatctaaataaatttagaataaatctattgtgttccataaaacccctgttgggatttcaattgaactgcaattaaattttagatcagttttggaagaattgactcaatagtgagccttcctacccaagaccatggcatttattttcatttatttatgatttctttaatgcttctcaaaattttttattttctctattatggaaacgcacatttatagtttgacaaattcctaagtacttctaattttattgtcattccacattatcttttttgttgttgttttaaaagacagggtctccctctgtcacccaggctggagtgtactgatgtgattatagctcactgcagtctcaacctcctgggctcaagtgatcctcccacgtcagcctgtggagtagctaggactacaggcatgtgccacaatgcctggctcatttttaagtgttaagttaaaaaaagttgtagaaacagtgttttgctacatttcccaggctggtctcaaactcctggccccaagcaatcttcctgcctcagcttcccatattcggattatacgcatgaggcattgcaccagccccatgtgttatcttttataaaatttaacatttaactgataattgatactgtatatacatgaattcgattggtatatatttttaatatgggaaattttatgcaaatgagcacatttttctcccttccttccttccttctttccttgttctctttctttctctctctttctctttctctctttctttctttctttctttctcacagggtgtcactctgttgcccaggcggagtgcagtggcacatgatcatagctcactgcaacctccaactcaaacacttgagtgatcctctgtcccccgtttcccaagcagctgggactacaggcacatgccacgatgccaagctaatttttaaaaataattttttttgtagattcagagtcttgctatgttgcccaggctaatctcaaactcctggcctcaagcagtcctccctcctcagcctcccattacaggcataagctgccactcctggacctcttttttttttttttttttttttttttgaggcagtctctctctgtcacccaggctggagtatagtggcacgatctcagctcactgcgggttcaagcaattttcatgcctcagcctcccaagtagctgggattacaggcatgggccactatgcccagctaatttttgtatttttcatagagacaggatttcaccatgttggctaggctggtatcaaactcctgacttcaggtgatccgcccactttgaccttccaaaatgctgggattacgtgtgagccaccaaacccagcccctcattttctttttgatttttatttattttcctctgtttttcttcttttggatttagggatgtgtgtgtggaggtgtattgagtccgttttttctttctatttgtgtggaaattatacacttattctttgttattttagcaattactctggctattttaacatgcaaatataatgaagtttagaattagccatttttta

SEQ ID NO: 94303 - DNA, 13312 bp, Homo sapiens
ccaccgtatgcatcaaaaaggggaatcctgagttagatcaatttaacagaactgaggacagtgcaaaagatattaaactcagggtcgagtaaattctcattaaatagtgttagttcattgattcattttgtataagtaccaaaaactcttttacagaaaccaaaagttactcctttaaccttggtacattccctttaaatatatgccttgggcactaggcaagaaggtatggaaggataagctcaggctttccctactggtaatagaaaaacagctcaaagagcagatattttgtttcaggtcatactaaaaataactatataaataacatagaaatgactagataaatatgcatagctacactatgaggggcctaaataaataagcaaatacaactcaatcaagagtttggtcaggaaaaggatctaagaggaaatatgttcaaggataaggcagtactaaaggagactctaggccatggggaaaaactggcccatgtggaaggatgaaatgtccttcccaccttcaccactcatatcagagaaaaaaaatccaggtgttgggaaggaacaattgattatggtgtcatttgttgtcaagctaatagagggacactttattatgtaacccatggtctggaggtcacaggctagaggaagatggttgtaacaaagaagaaagaagaggattctaagggcttacctgtggaatgacaatgagggtcttccaacaggtcagagcaatgaggccatgtcttctcatacagtgcaaatggggaatgagagccacagtgacacagcacaccacaaaacatggttttgcatggcctctacctctttgcaatttgaatgtatcaccagagaacttaagcaaaaatacgcttgaatttatttgtaatatttgtgcattcacctcagtgggaataatggagaagttaatatacagcatcaaagaagaataatgtcctgacatcctctccaactctgtccttgtcaccccaacatcaggtaaatatcctgtaactgtgaaatacagggcagagaagtttttgtcgcctccccagaaaataatgtgaggcacattttgtggtccaagcagacagtctctcacaggatttataattaaatcaacctgccaaagaaatgtctgtactcccatgttcattaaagtattatttacaacagccaagatatggaatcaaactaagtgtctctctacataagaatggataaagacaatgtggtgtatatttacacaatagaacactattcagccttcaaaaaagaaggaaattctgtcatttgcaacaacatggataaacctggaggacattatattaaccccaataagccagggacaaaaagtcaaataccacataatctcacttgtatgtggaatttttaaaagttgaactcatagcagcagagagtacaatggtggttacctggggctgggtaggggatggggagtgagtcagagagattttggtcaaaggatataaaatttcagtttgataggaggaataagtggtgattatagttaacaacaatgtattatactcttaaaaatagctaacagagtagattttgttttctaccgcaaaaaaagatacataatgtgagataacacatacgttaattagttctgtttagccaatccacaatgtttacataattcaaaatatgttgtacatggtaaagacacacatttttacattaattaattttataccataatagtttaaaaaagaatttacaattgaatcctttaatgtttaagactgaggcaagaataaacaactgatggaactgctttgctcaatgtttcctaagtgcacatggcctgcttctcatgcttcgcagccatttagtctccatttacttcttcacctcaagatctttacttaattggtacattggctttcatgaccactttgaacactttcctctggctctccataagtaatgacatttacaattgcagcagctcattcttttcctgatcttccttccagagaaataattcaatcttttcctgccatcaaacaaagcatgcatcttggcagtttatgattatgcgctctaatcatcatattgtcaagaataagaagcaaatcactacaaaatgtctcaatgtctctgtggtagagtcagatctagcccctttttttcagggtctatattcattcttttttcaggttacactagccacggagcacaataaattcatggtagtgttttctaatccaaaaatctctggttcgtgtctcatgaggagtacaatcacaatggcatacagttcttctattttttgtgtgtgggaaaaatagcaactagtttgagatatcaaactcaaaatggttcatttgttctgaatgaatttctctgaacatatcccaatcattgggcaatgcatgactgtagataactactcgttaagccttttatgtcaactctttcttcactcaagataagttccttcttcattagagactgctataggtgaaaatgtagggataacttcattattcaactgaaattttaggaatcattaaaataggatcagacaagcctcaatactgtgacttttaaaattttatggacattctatgtgcaggtacaatgtgaatggcctcatgttttgtaagctcactgtctctcattttcaaagttttatgggtttctactcctgcaacctcatagtccacttcagtctctagttttctttatacataatgtctaggtttcaataaaaaaattacaagatatgtgaagaaacagtaaaatgtgttctagaccaataatcaagaggaaaatcagttaataaaaatagatacacagtttagatgccagaattataaaataagaacatataaatgtctgataaatttgtatgagaatctatacaaaatagtaagcataatgagcaaagcaattttggagagatttgcaaactgtaaaagaaaaccaaaatagaatcctgatgctaaaaaatagatacctgaaataaagtattcactgaatgtgtttatgagcatattggacacaaataaacttaaaacaggacagcaaaaatcactcaaactaaagcacagaaagaaaaatatttaaaataatgattgaagtgtaacaatattaagtagtcaaatacatagtattgcattttataaataatgaaaaaatagctaaaataatgaaagaatatagacatagaatatagaataagaaagaataagaaatgaaaaaatatagaaatagaatatagagatagaaagaataaaaactttctaaaattgattacaaatgtcaatttagaggttcaaaaaagccagtaagcaccaagtacaataaattgaaaacacacacacacacatctaagagtatcatataaaatggctttaaacgaagacaaagaaaaaactcataaaaatagctaaagaaaaaacagactaatacaggggataaattataaaagagagtgatgatttcccatcagagacaagagagacaagaagaaaatataacaacatcttaaaggaccaaaagaagaaaattatcaaatcagaattctaaatacatgaaaactgggagactattgccaacataaatgcaacatttaaaacatgctaggcaggttcttcatgatgaaggaaaattataccagatggaaaattgaatctacaggaaggaatgcaaaataccacaaaagctaaatatatgaaaacatataaaacattttgtttttcaaagctataaatatttttgtttctcaaagctataaatactaagtacctataatatccttggcattaatttagcattgtatgaatgtggggggaaaagtcaataaaggggggaaataaatgaagaaatgggagtggaataataagacatttgctactgttaaacctttttttattggtttgtttttgagacagagtctttctctgtcacccaggctggagtgcagtggaacaatttcggctcactgtagcccccgcctcccgggttcaaacaattctcatgcctcaacctcctgggtagctgggaccacagctgtgcaccatcatgcctggctaatttttgtatttttggtagaggcagggtttcacaatgttagccaggctggtctcaacctcctggtctctagctccttggtctcaagtaatccacctgcctcagcttccagcagtgctgagattacaggtatgagccactgttcctggcctaaacatttttaccaatgacttaaataaagacattgacagcatactgggaaagaaaattaagtaaaagaaaatgaacaaaatatgccacacaaaatctaaccataagaaatcctgtgaatttgtaataatgtcagacaaattagacttcaaggcaagtagtgggtcatttcaaaaggataaaagagtcaaaataatcttaaatgtatatctaaaatatctataataaaaaagcttcaaaatacatgaagcaaaaattgatagcaatgaaagaatatttttacatctcttagtacttgatagaacaagtacacatacacacacagtatgagttagtaagaatatttgaataaacaaatcaaaacaatttgatattcatagaatattatacccaaacaaggacaaaatacacattcttttcaaatcacatggaacaaccacgaaaatataccctatactgggtatatcataagcctcaggaaattttgaaaacttgaaattatttaaaatatatttgttctcttacacaacaaaattaaaataaaaatcaataacattgagatatacagaaaaatctcaaaagtatggaaaataaccctcttttaagtaaccagtgaatcaaagaaaaaatcaaaagtgagtttagaattattccaaaatgataatacaaaagacgaaatggataggatgtagctaaaacagttataaaagtaaaaatctatcactttaaataaagaaaagcagaaagatgtgaaatcaacaatctagattttccacttaaaaagcctgaataagtgtaattaaataaggaataagcagagagaaagaagtaacaaatagaagagcataaattcatatagcaggaaaaaacaaatagcatcataaataaaaagacaaaaaattaatttcaaaaggatttaaaaaaaggggaggggggcatatatctagctagacgaaccaggggataaaaaggaaggaaacacaaattatcaacccaaagaataaaatatggtatatcattttgtgtcctagaaacattaaaaacacaatgaaatgttactgaaaaatacttttattcagtgaatttgaattactatatattggataaagttattgtaaaatgcactttgcaaaactgacacaaaaacgaaaaaaataaaatagccacttatctgataaagaaatcacgataaaactttcccacaaaaaaattttaaaaactaaaagtccagatgtattcaatgataaattttatttaatgtgtaaaaataattaatcttttctaattcatttcatacgaataatgtaactctgataccaaaacctgacaaagatattacaagaaaaaatcacagaccacaatcatgatggaggaatttttaaacaaaatattaagaaataaaatccaatgatatataaaaaggataattcataacgaccaagtggagtttatcccaagatgcaagtttgttttaacatccaaaaattaatagttggaattctcttcattaacagaagattagaaaaagtataagttattcaattcatgcagcaaaaatatgtgacaacattcaacaaacctgataaagggcatgtatgaaaaacctacagctaatatcatatttaatgttgaaacgttgaactctttctcccaagaccaagtgagcaaggcaagaatgtctgctcttgccctgcccggcgccgaccgcccagtgcctgtccccagactgaggcccagcccccttcgcccgtgcccatcacgagcgccaccagcatgtctgacaaactgccctacaaagtcgcagcctggggacgcaaggccctggacattgcagagaacaagatgccaggcctgatgcgcatatgggagcggtactccgcctccaagccactgaacggcgcccgcatccctggctgtctgcacaggaccgtggagactgccgtcctaatgagcctcatcaccctgggtactgaggtgcagtggtccagctgcaacatcttctctacccaggaccatgcggctgctgccattgccaaagctggcatttcagccagcactggcattccagtgttgccgttgccaaggctggcatgcctggaagggcgaaacagacgaggagtacctgtggtgcattgagcagatgatgtacctcaaggacgggccccttaacatgattctggaagacgggcgaccttaccaacctcatccacagcgagtactcgcagctcctgctgagcttccgaggtatatccaaagagaccacaatcggggtccacaacctgtacaagatgatggtcaatgggattctgaaggtgcctgccatcgatgtcaatgactccgccaccaagagcaagtttgacaacctctatggctgtgggagcccctcataggtggtatcaagcaggccacagacgtgatgattgccggcaaggtagcggtggtagcaggctatggcgataagggcaagagctgtgcccaggccctgcggggtttcagggccagcgtcatcatcaccaagactgaccccatcaaggcactgcaggctgccatggagggctatgaggtgactaccatggatgaggcctgtcaggagggcgacgtctttgtcaccaccacaggttgtgttgacatcatccttggccagcactttgagcagacgaaggatgataccattgtgtgtaacactggatactttgatgtggaaatggatgtcaagtggctcaacaagaacactgtggagaaggtgaacgtcaagctgcaggtggacccgtaccggctgaagaatgggcggggcatcatcctgctggctgagggtcrgctggttaacctggcttgtgccatgggtcaccctagcttcgtgaggagtaactccttcaccagccaggtgatggcgcagatcaagctgtggacccacccagacaagtaccccgttggggttcacttcctgcccaagaagctggatgagtcagtggctgaagcccacctgggcaagttgaacatgaagttgaccaagctgactgagaagcaggcccagtacctgggcatgtcttgttactgccccttcaagccagatcactaccgctactgagaacccggtctgcgcttcacctttcagccgctgtccctgcccaggccccgcctctcctccctaagagcaaacggcaccaactttgtgattcgtttgtcagtgtcccccatcgactctctggggccggtcactcagtttttggcctctgctgcagtcctcatactgttccaagagtggcagcgggaactgagaggcccctccagaagccacggtcatgatggaggtcccagccacagggaaccatgagctcagtggtcttagaactgcccactaagtcagtccttccttagtctcagtcagtagtggagtcacaaagcccgtgtattttgtcatctaggccttcacctggtctatggacttatacctgtgtgcttggttgacaggtccagtggttcctcagcccatgacagatgagaaagagctatattgaagggcaaagaagatctgtcgatcgaattttcctgagagactggcttagtgctgggccttctcttaaacctcataacaatgaggttagtacttttagtccctgttttacagggattagaatagactgttaaggggcaactgagaaagaacagagaagtgacagccagaggttgagaggggccataaaaacataaaagctggcagagatctgccaccactttgtaacctgatggttcctatcagagaataatttggcctacaatgtttataatgttaaaagaaagcagaaaggtgggtaaataaaaatcttggtggaaaaaaaaaaaatgaagtctgctcttaccacttctgtatatctttataccagagcaatagataagaaaaaagctatgaagattggaaaggaagaagcaaaaactttcattatctgcatgtagtttgactacatagatattcataaaatatatatcaaataaattattagaattaataaaattagatcagaagctgaaaagtccaaaaattatctatggtcctatatactaatcacttaaaaactggaaaataaacttctttaaaataccatttacagtagcacaaaatttaaatactatttgtgatagcatcctattattattacaatattgatagaaattactttaataaaaatctatagaaactgtatgctaaaattataagaatattgagagaaatttaagaagacctaaacaattgaattgaaactctcagtattaatattttatttgtctccagatagctatataaactcagaaacaatgccagacaaaatcctacagaaatgtttctacaaaatgaccagctgattcaaattcatttttagaaattcaaaaaaactcagagttaaaacaatctggaaaatgttgatagagatacagtagcttattctaagacttgttctatagctacaatagtttaaaaaaaagtggtataggcatacgaataaaaaaataaatcaactgaatagaatatgctctagaactagaaccacatacataggatcaattgattttcaacaaaacgccaagataatatttgggaaaaaaaatatttttaacaaatagtgctagaacaactgtatattcatatggggaaaaaaatgagcttcacccccccatttcatattatacatgaaaattatatccctgccaaatggatcaaagacctaaatatagaaattataaatttaaattatctagaataaaatacaggaaattatcttctctaaaaatttacaaatatttattcaacagaaaacactaaccatattgataaatttcatcaaattttaaaatcttgtgcctcaaaaggcaaaccattgtttggaataaaacattcttagtacatacgtacaacaaagaacttgtatcgaaaatatattttttttaatctgctacacttcaatagtaaaaataaccaaccagtttaaaaatgagcaaaagacttggacaaatacttcaccataaaaatattaagatagccagtgaatatgttaaagaatgctcacactcattagtcactagaaatacgaaaattcaaacaacaaaataaaactccatgcatactaaaagagctaaaatttgagagtgacaatatgaagtgccagagcagatgtatagtaaactagagctcttctatgcttctgtagacaatgtaaaacatataaccactttgggaaacagtttaccattttcttagaaagttaaatatatactgcctacatgagtcagcaaccctacccctaagaatttgctcaggagaaatgaaaacttatgctcaggcaaagatgtatacataagtatttatagcaactttattcataacagccccaaattgggtacaacccaaatacccatcaagtcatgaatggcaaaacaaaactagtaaaataaataaataaataaataaataaataaataaaaacctatgcataaatacaatagtctagctgtatctcaaaagcattctgtacagtaaacaaaacttgatacaagggtacatactatataattatttttagtattgaaatatctatgcatcactttaataacaaatcattgtaactgagttcaaaataaaggaaagaagatgctttatttagcttccaatttctgggagactcaagaattataagtattctggacaacaaaagaaaataagactgtgcttacagagcttgttctgccatattctttctttaggatggctattttattgttgccctttttgttacatggaatgtgcacaacaggttttaaaaggtacaacatttctataactgagtgccactttcagaaactgaacaggcaaagaaattacactgaacatcagcatctggcagtattttttgggaaaaacgtgactaaaatggatttaaatgaacactattaaatcacatctaatatttgatactacatgactctatacagctatatgatacaattatacaaaatgtgttaacatcaaagaatataaccaaaattcatatagcaaacaaatcctatataactttttttacaggaaaatatttttgaagcatgcatgtaactgcccattctttcaaagaaaatctattgcaagcaaaattatcaacctccagaaaaatcacacatagcattactaagcatatcttcaaaaagtgtacaatatgcacacttagaaaataaaaaatttaaaaaattataagcaacaaatgagcttcatacttgcaagaatgtaaacagaagtcccatttttagcactgttgtataaagaattgtcttttgcatctacgagttgtcctgttgggaacacactttacaaaaaaaccatgtttttgaaacaagattagagagcaagataaagcatcttttaaagcctttttaaaattcatgtgtgtggaaattgaagtccagtgaaaagcatttcccacggtcttcaaacgtgaactgaaacagcttctctccagtgtgaaccagtttgtgtggtttttgttttgagctctcaacaaaagctcttctacattctgtgcagaagtggactccgtgacagtgagtgtgcagatgttttctcatgtcagttatccttgaacatctttgtgcagccttggcgagggccagctattgttcatggaacatcatcttttaaatttttcttggcttcattctggcgaattctgcagttttttgggatctgagctgtcaatgccaggtattcctccaggaggaagtttctttcctgtcatatactctgaataatcaggaggtgagttctctccagtgatctgtttctcaaccactattttatggttaatgtctttttgttttcatccgagtaccacatggagacagataacttgccctccaggttcctgatctgcactcgcttctgcccccacttcttgttgcccaagatggtgccacatccacccttgccagcccccacgatggtgaccagggcctgcttgaggtggtggtggtggtcgccgctggccagctctggcaccaggatgagtatctggttccccatccaagtcgtcgctacccaccacctcctggcatgcctgcaccaggatcacctcctggtggtggtgaacctgggtgaggtcgtcgtgaggaatggctgcagcagatcctggccaggtggtgtgggtggtcacaccctatgcctatggccacccctgccaccgtcttcattgtcattgtcctcctcctcgcctaccatcatggtctcaatggtcttcaccaggatgatgtccacctagatctactgcagctgcaagatctcagccagcatctccgaggcgtctgtacccatgcagagggtgtcatccagtggcctgggctcctcagctgtggtggcaggcaaggaggtggccaactgtgaggaaggaagcttaatttttataaagatctagaataggaaaaacgaagctatggtaatagtaatcagactgtctcagaacaggggatatgggaatttcctgcaaagagggatgcaagagacattttgagatgatggaagtactgtatgtcttgaatagggtgctgataatgtgggtgtacacatttgtcaaaagtcatctaagcgttctcataatctgtgcattttactgtgtataaattatacttcaataaagtgataaaaaatttaagatagataaatagatcaagctatgagtagatattcttcatacaaataggccccaggtcgattccccagatgtgtatacctaaattctttggacctttggtctggggtccttgtttttctccaatgtttgaaaaggcaatttccccttctgtgagtgaactagggaaaaatactctaattgatttgatcagcaaacccaaaccttcctctatttaaagagaaaccaatttgaacattctgtaactgcatacagatcttgccttgcttgaaggggtctgcctagtaatcccataatacataactctatttcaaatgggattgaggttactgaggcagagcagaaacatttgctatgcttatttgcattaaccaatagttggactggccttggggctcaaagatatttgtggaaggctctatggtctactgagctgatgaaatggcatggctttctgtatacatagagataactttttgataactatgatcactaacaaatgttgctacagagagatttagacaagcatagtctctgattagaagggatttataatctagcatggataatattggcatggttcaacatgtggaggatttaaaacagacagaaaaagatactaaccaatacacaaaatgacatatttcaattctctatgtatccaaattttgagccttgtatttgggagtcattggaaaacccaaacaaaaacttaactaaaaagatttaatttcattacccttttattcttgatctttatgtacctaataaaaacaaagtattgaatcaaaaatggaattaacctcagaaatttagaagatatctgacaaggtagaatagagctgcaaaaaatgttttggaaaaatttcaacccctgaatattgaactatgactttacaagtaactggccccattcctcatccttctgcctatgtgtagagaggccccacattctcactgggaatgtagtagaggtcaacgggtatgactttttgttttatgatgcacaccagcatcatgggagtaggtaaggcatgtgtcaagctcagctcaaaagagctaatagtcacaaaaggttacacacctaatacatatcattcacaagtgccctctgattagttctcctcatggttctctctaacacgacacataaagagcaatgaggagctgttatcttaaaatctggagcaaggatgcccagaaataaaacctttattctcagtttggagttgttggtctttgaatctcatctgctctcatcctcttccttcactctctgctagccattgtggccccttggcattactcaaacattccaaacaggatctccatcttctcaccagctggaatggtctttctccagatagtcacaagatttggtccctcacttcttccgtcttt

SEQ ID NO: 94304 - DNA, 63309 bp, Homo sapiens
aagattcctgatgcctattatatttggctgaaattaccagtctaatcaagctctaaaattttatgtgctataattccaatccttcctttgagaccacacttgggtcaatcttcctgataactttcaaataagctagcagatcaagtaaatcaaccaatttgtataaaatacgtcttcctccattcttgtcaagtgaaaagaaaatgtgattctttgacctatttgactaagatattttaacaatattgctgttaacatatacctatgtagtatgctacttagatgatgggacataagaataagaagctagaccaatgagcatggtgttcagaagactaaagaccaggatgaatagaaatatctgaacaatgctgtgtagaagaaaatgggtcctgaagactttgctactgttttttcttctcttttgttcatttgtttattttttggtataccacatacagaggaagaaaaatgaaaaagggaaagcctttgttttttgacctagcacagatggtgttctattaaaaggtgatagaaagaacacagaattattccactttctctttgcttctatctttctctttgctcctatattttgctccaaaacaatcttcatattggaaagacacagagtggtgagaggtaatatggcataattttttaaatgagccttggaatcaaacattaatttggaccgaggctcttctcttaggagttatgtggtcttaaactatttatctgctctgagtctcacttgatggtgtcaatagttccatcccccagagtgttagaagtatataaggtgctttgacacagtaacagcttaataattgatatataataggggatggatgcccaaaataggtaagaaaataaataagaattttaaattaggcaataatttaaggtctaaaaaaattacatttcaatgtgctgaaagaacttataaaagtaatactgatgtcactgctggtaacttttgaaaagtcatggcaaatgatagatgtggtagattgttgcttcaattttccaaaaaaaagggaaaaaaagattttcaagattcagtaattccaaccagccagctagaaggaaattccagatgcagtatggattatgaaacagatattctatatgcaattttaaaaggaagttgtgattgctgaaaccagcacttaatcaaacacaaaacatgctgaaagcaacaagatttcctcttttttttttcttttgaggggctgcaagactaatcagagaaatgtcatcgccatgatatatttgcatctgaagaggacatgtgacaaaggttttatgaatctttaatatactaatgtgcattatgaatatccagaggaagctactgaattcagcactttttaaattatttgaccatggaacccattttttgcagagtaaaatctgaaagaagttgggttgggcagaactttgggaaacactagtatatgcctggaaaataaatctccactttttatgtagctttggggatattgtgtttattttcaaacatcatcttttaaaggaacccagacaaactagaatctttccaaaggaggggccagagtaatgaattatataatgctatattgtagaataaatagttaggaactataaaagagacacctggggagtaaggttgtcctgacagttgatttcaagtttcttaatggttgttatatggagaaagaactggattacttctgtttagtttaagcaaccagaaataggagtagtatctaagaattatagggcagcaggttttggctgaataaaaaattgttgtgagagtgctagtcctggggtttgacagactataattcaacagcagtcctgcagtttttggctaggcagcttaatctctcagaaacttggttttctcatttgtaatagggggaagctgatggaggtaccacaaagagtaaatcctacattaaatttgaaaagatccgtacaattcctggcacatagtaagtgctcaataaatggaattctggtgttattggtaacatatagagctactcaataatgaaaaggatggaggacatctgatagcagagaacaactcaatagtgtaaatgttcaagcatattcttaattatttaaaaaagaactgaaagtctacttcaggcaacacatcacgggaagtagctgtgactcagttcctgtctttatgagctaagtcacatggggacaagcaggggagttaaggcaaatatattaaacaacaataacacaaggatgaatgcttgcaagaatctcagaaattacgagcgtgagtgctgattattttgagggaaatatggaaggctatatgaaagtggtagcatatgaagaatagaaaatttttcaatggatgcggtaagaaaggaagcagcatgttacagaagggactattatgaggagatgctgtaggcaaaaaagcacaggaatgtatccagagaagcagcacagtttgaaggggatataaatgcaaactagaggtaaatgagacacaattctggataattattgggggggctacagaatggatcttgtacttgacgtgggggtcagtggggagactaaatattatgagagaaagaaaagagtgtctttatccaaacttacttaaaaaaaaacatgaagttgacagtggcaataaaattggttaggatctgtgtgattcctaaagcaggaaagccaataaaaaaaaaaccacacacactatagtataactggccagccaaatgcagaaggttgaaaccgcatcccttctttacaccatatataaaaattaactcaagatggattaaagacttaaatataaaacccaaaactatagaaactctggaagacaacctaggcaataccatgcaggacatacacatggacaaagatttcatgacgaagacaccaaaagtaattgcaacaaaagcaaaagttgacaaatgagatctaattacactaaggatcttctccacagcaaaagaaactatgaacagaataaataacctacagaatgggagaaaatttttgcaaactatgcacctgacaaagatctagtatccattatctataaggaacttaaacaaatttacaagaataaaaaaaagacatgaaaaagtggacagaggacatgaatagacacttttcaaaagaagacatacatgcagccaacaatcatataaaaaaaagctcaacatcactgatcattagagaaatgcaaataaaaactacaatgagataccatctcacaccagtcacagtggctattatgaaaaagtaaaaaaataacaggtgctggcaaggttgtggagaaaaggaaacacttataccctgttggtcagagtgtaaattagttcaaccattgtggaagacagtgtggcgattcctcaaagaccaaaagacagaaatcccattcaacccagcaatcccattactgggtacatacccaaaggaatataaattgttctgttataaagacacatgcatgtaaatgtttattgcagcactatatgcaataacaaagacatgtaatcaacctaaatgctcatcagtgatagtctggacaaagaaaatgtgacatatgtatatcatggaatactatgcagccataaaaaatatgggatcatgtcttttgtggggacaaggatggaactggaggccattatccttagcaaactaatgcaggaacagaaaaccaaatactgcatattatcacttataagtgggagctaaataatgagaaaatatggaaacattagatgggaacaacacacactggggcctattgaaggtggagtgtgggaagagggagagaatcaggaaaaataactaatgggtactaggcttaatacctgggtggtgacataatctgtaaaacaagccccaataaaacatgtttacctatgtaacaaatctgtgcatgtactcttgaacttaatttttttttaaaaaaaagcacaataagtgaaaaataaagagaatctcaagtaaggtggaaacagtggagacggaaaggaagtcctcactgggatccacatgaagaactggctctgttggagaatatttgacagcaggcaagggaggtgatggtctcagaagaccaagtttcagttaagggaggccttaacagcagctttccaagagaaagtcatgtcaggagtattcctcagcagaatagcaaacagagactcttactaaacttttattcaatagatgaatacattattggccatttttggttttggttaaagtgaaacaaaaacagatagatgttacacatgaatgaatgaatgatttgggttgagctctaaagagaaaaatggaagatggtaatagaagcaaaagtttgtcagagcccatctgaggaaagggaaggctggttggatagagatgtgagtaaagaaccagcaaagaccttatctaaggatgagtgaagggcacaggagctaaatcagggcttggccaaataaggcctgtggccaaacccaaccctaccaacctgatttgtgcagcccatgagctaccaataacttttatgtttttaaatggttaaagtaaattcaaagaaggataatatttcatgacatgtgaaaatgatatgaaactcaaatttcaatgtccgtgaataaagtgacgactgtttttgtcattttatatatatatattttttttgcagagggactggcttgcactttttaaacattagttatattattctcagtacaaccctataagataaaattcattcccattttactgatgagcaaactgcagcttatgtttcagccaaagtcagacagttcattaagggcagagtcatccatggcaatctgcctgtccagatattacactttcccccggggtaaaagcactggctctaagaatagtgagaacaaaacatacttataaaagggagttgggggctgggaatggtggctcacgcctgtaatcccagcactttgggaggccgaggcgggtggatcacttgagatcaggagttcgagaccagcctggccaacatggtgaaaccctgtctctactaaaagtacaaaaattagccaggcgtggtggcgggtgcctgtaatcccagttattcgggaggctaagacaggagaatcacttgagtccaggaagcggaggttgcagtgagtggagatcgcaccattgcactccaggctgggcgacagagcgatactctgtctcaaaaaaaaaaagagagttgggaagtgttttgaatgcttagagggcagcttgggaactcaattagaagaagggacggtttaagcagacatatttctaagagacttatatgagttaactcatttgatcctcagcactcctccatgagttggatgctattattaacaacccaatattagataaaggatgaccttcttaaagacctcttcccaggaaaaagactgtgtgtgggtactctgaagctttggctcttctggtggggacaccactgggtttccaaaggctcatccagccaagcgaagtatctatgacctcgtcgtgttcagcgcgcttagggaaggattctatggactgcacttttaccctggtgtcctgcattcttgctccaagacttctcttaccactctcattcccctaaatgcagcttctgacaccttctagctacgagttcttgggctcctccttcgtgacttccttttaagataatttctgagttacaacaaatcagcatttgaagaaatgcagcagataagttgaaaattcaagtgctgaggaatgtaaaggcccaaaacaatcccgtagaaagcacagaggcagatgacagtcttccgttaaagatttcactgctgtagatttctgagagtgctgtgtagctgtcctctttatcctggtgtttgccacttcgaacagtcactttcccacttggaacttacttgtggctttgctgacaaaacaggaagtgatttgaatacagtttgtttttatgacctttcaacctcaggaatttgaaaagttttagcagtggatttacagccttgcttaatacttctatttcttacaaaacaaccgtataggggttaaagtatcagtgcaaagtcccgttcaaatattgactcagtaatgagctctacaagccagcctttgtgrcatgttaaattcaaaacaagcttagcatttttttttttttttggatagaaactggtgggggtggggaaagaaagagggaactgggaagagaaggaggggaacttaaaccttgcttcctgctctgtctttctcagaaaaccaaatatggcatcttccatgaggagcttgttttctgaccacgggaaatatgttgaatctttccggaggtttctcaaccattccacggaacaccagtgcatgcaggaattcatggacaagaagctgccaggcataataggaaggtaacaaaagggacgttgttgtcaaagggacaagcctcagactggctgtgcgtcagtgatagatgggtctcgctcagcctcgcaggctgggcacagggataagggcgaattactgatagcagctccccgtcgtcccctcctcgctgccctgccctgcctttctcctgcagtgctttggttccacgtttgctttgaacactcaaaggctcccatttgtgttgtatttccagctgcatagagataagcgttaaccatttgaaggcacaaatccatgttcatttgggaaaagataagatgctaatcttcgaactcagatttttcagccctcctccaaattttacatcccaaaaaagtcccaaagggagtctggtatgcttttcattagaatcaaatataaataattgccaaagtacgatttgccctgaggattgagtgcctcagttctcataatatccatttaaattaattttccttatccattgttatagttatcactctcttcctcaaaattgtctttttctttcagcttaatattagcaatgtgttccttaaaaaaagaaccattttcccattatcagtgaaactcactggttcctatccttcttgcagagttcttttttttgggtgattaatgtgttcaatttgtgccagagctgataagcattatgagagtaacagattccacatgctaaagataatcaaatcacctatctgggggtgatttgctgtaactcattctacttcaggaaataataatggaaaactgggaagaaatgactatggatccaatttgcaaacagcaaaggaaagtggtattttatcttttgctgaatttctctattgcaggcctgaaattctttcaccagggcagtacctatgtctgaccagagcaggcattattagatgtacataaaattttatttccttttctatttaacatgattcagattttaaatgttagctttcaaaaaataggatattatatattaaaaattaatatgtaataggataaggatgcaaacatcaaagcaaatagcaaatatagagaacttcttacctaggaactaattatagttaacctctttgggtytctttgctcatttctaaagttaaaggtaatgagttaatttctcaattctttttcagtactaaaagtatttgctcatgtctgtagcttaccagatccttggttttcttcagccatacacagtttggtttgaagaggtaccgtggatggagataacataatcgatgatgaatgaccccttccttatcttcaaagtttaaatctaactggaaatattataaaatctgtgaaagactgaagaatttttaagggcacactgtttgtcttataacagtagtatatagttaggaatgatcagattcagtgtcatttatttttttcctgaaggtaatgtttgaaataagatttagctgaaggacttttaaaattgttacttagagttgtctataagttatgaagtaccaaaatgtgattaggatactctttgtgtatgttagggcagggtttgttgagtttgtggctcactgtgctaattgagtgtggagcgagcctattaaatttttattaaagcaagacatgccatattttaaaacatcaaatggttctaaagtgtgtggggactataacaaaccccacccactccattcttgattcccactctccggaagcaaccactttcagcactttgaaatcttttagttatttatggaattttctttcataattcaaaataacatgttattgttctatttcttcatttcgctgtattaaaatagctaagtaagcatgcatatttcccaccctatcatgtcactatatgtagtcaaaattttggttaaataatttgagtgtttatgttattttgcctatgtacatattcttaataattgagcaatatattcgactatgcttatatttccttttacgtacaactttttgttctccctagagttgactattgccttgattttggtttcttttcttagttctccatgtacctattactattttgatccccaagcagatatattaatctcctctcaatatatgcaaacatatcaaggaatctgtttattttaccccaagggaacaacttttctgaagccctctgttctttttttcagtttaggaagatctgctttggcctgctatacaactattaaggagggaatttatttcactttctgagaatcattttctttctccattatttgattccctgattctatatctcatgcctttcttttctttgtttcctcggtcctttgtttcctgaacaattctttaagaactttaagagtgaacgagaggtaaactttttgagactttgtatgtttaaaaatcccttggttctatgttaatcgtttgactggatatagaactctatactgaaaatggttttgtataatagatctaaaggtacttttccactgtcttttagataccagaattgctgttaacaaataaaatactggccagatgtgttggttcacgcctgtaatcctagcacttcgggaggctgaggcgggaggattacttgagcctaggagtttgagaccagcctgggcaacatagcaagatcccatctctacaaaaaagtgaaaaagttagctgaacaaggcggcatgcacatgctactccagacgctgaagtgggaagatcacttaagtccgagagatcgaggcttcagtgagatatggctgagacactgctctcagcctggatgacagagtgagaacctgtctcaaacaagagaaaaaaataaatcaaatgctaytcaaaattctcatccttggcatgtggaataacttttacattgctatgtgttttgttttccctattttgaactttttagaatcttcttacgtctrgtattctgaaattttaaaatactgagctgtgaaatggttcctttttacccattttatgggtactccctgggctatttcaattgagattcagatccttcagttatgmggaactttggtaatcattcttcaccactgttttctttttctggaacttttattcatcaaatacttcctggattgattacctaattttcttatatttccagtttgctacaactttcctctttcagcccatstattaactttttactattatatttttaatttccaagaatgttttctatagcattcttttcatcattcccagatgtaataccttcttattcattacaaaatgttcctctgctctctctgcctctttccatctctgtttcttatgttagacagctccccaaccacctaaagagccttggttttctattcaatcaaataatgaggcactaaaaggtagtcagattctctttgtgtaagtcagggcagggtttgttgagtgagtagctcactgaataattgagtgtggactcagctctttcctgggagatcctcagatataaaatcatgttaactttatcactgagatgatttgtttccctatagaggaattcttcaatcccctatttgagggtagatggtggggcagggcttgggggcaggaaaaattatagtaaatamctataaatagtaaagttggttattgttgttgcatataaaacatttaaatccttggctagaaaatagtaagttttcaataattatttgatgtcattataatatgtgaaatgggatgaataatagtatctaactcatagaggaatttcaaggattcaaagagttaattcacataaatcacttacatgtacctagaatcataataattgctaatatatgtggagtgcttgtcatgtgcagatacatttctaagagatttgcatgaattaaatcattgaatcctcacaacttctccatgaattagaaacagttattaataatcctacaagagagatgatattattatcttatttcacagagatgtcaaataacttgctcaaggtaacataacagtaacctgggatttcaacttgggtgctctgcttcatagcctccctatgctgtcatagatgtaagcattttaaagaatgaacaaaaggtgtagatagaaatggatgtgttaggactcaggattatgagttggaggataattagaattgaagaaggcaaatcatttataggtgttctcgaccctagactttgcaagattcctttagaaccttacttcaatttttgttcccatcctgtgactgagcaggctttttgcactgtagacaaaacacagttttgtttgccatcccaaagtccaaagaaacaaacaccatccttttcccttcatggttctcctacagcagtcatctcttttccttctctctttcaccctgtttcaacagactgtagatctgcttcctcatttttgagctcagttttaatcccattgccatctgacttcagtcttcaatcttcttttacaactgccattactaaagacactcgtattgccaaattcgatggagatttttccttttttaagtagtacactctgctgcttttgccatgacgacgggctttctctgcctccaattactctggtacctctctgtgctttatttcttttcttctctgtcttctttgtatattcttcacaatccagtgatctttagaagttggtattgcatcaccatccactactactataactctgcaatatctttgggtgatggaatctacttttctagcactgaccattactttatgatgatgattctccagaatacatcattgaccctgatttctctcctcccagcttaaatcttgcaaatccaaatgtctgctgaattcgtatttattttttttaaaagccctgacaaaacataagcttgctgccaaactgtatttctcagcttcctttttggcatcaccctttgcccagtcatccaagcctgaaacagggaagtcactgtgcattcatatttttttctgacctcttcacatcaatctaacagcaagtcctactggcttatttcccaatctgtccactccactctatttctagtacctgagtcataattcgggctttattatctcacatttcattttgagagcaaagtgatatctgtttttttaatgcctaggatagaatacacataatgcatgtttaataaacacttgttcattaaaaggaaggttaaaaaaagggggaggaaagaaggcaaacattatagatagtgggaaccagctgagcctttcctttatctacgatgagtggcttattatatgactagactcaaaactccactttttctgttcttgttctccaagccataaccaaacaaatggcattttgtacctctgatatgtacatactgccatttccaagtctcccagttaaagattgttaatgaataaaacctatattttgaaatatactctaaagatggcaatataactgatataattggaacatttcatgttggcctagttttcattcattgtatttttagtctgttctcttcaactagactagataatcagatttcacaaagcacctaacacatttttctaaaactacataatttttttctttcaggattggagacacaaaatcagaaattaagattctaagcataggcggaggtgcaggtatgagtaatatatttttaaagttcatatttcactttaaccattatgctgtgtgatgacaatattgttcattttttaggaagactttttttttttgcttttggaagagatcggcttattaaaactagcaatattacttcaactaacattaatgcccccatagatttacagggtttaggacattagccttcattactatctctattgtgaataagtgatgtgacttgttcttttgatagatgaaaaatcaaataggataactttaaggataactcttatccaaaatgattaaaatactcacagaaaaggaaaatctcataataagcttcttaagtttgtgccatttaaaaccttgttcatggactggttactgttttcaaactgttattggtccatgtgaagatctgaaatgtgcacaggaggctgggcgcggtggctcacgcctgtaatcccagcactttgggaggctgaggggggcggatcacgaggtcaggagatcgagaccatcctggctaacgcggtgaaaccctgtctctattaaaaatacaaaaaattagccaagcgtggtggcagacgcctgtagtcccagctactcgggaggctgaggcaggagaatggcgtgaatcctggaggcggagcttgcagtgagccgagatcgcgccactgcactccagcctgggtgacagagcgagactacgtctcaaaaaaaaaaaaaaaaagaaagaaagaaagaaagaaagaaagaaagaaagaaaaaagaaatgtgcactggaatataaactgatgcacagcttttttcattgagaaagtctcaccatggggaaaaatgtgctcagtgacagagttaatttacattcttgtgaactcattctttgagtggcatgggcctaatctgttcccttcctcttactcagttccaaaactgaatgcttagaattacctctagcattcagataactcctaagcacctttttttttttgacggattctcactctgtcgcccaggctgaaatgtgcagtggtgcaatcttggctcactgcaacctccacctcccgggttcaagcaattctcctccctcagcatcctgagtagctgggattacaggcaccaaccaccgcacctggctaatttttgtatttttaatagagacggggtttcaccatcttgtccaggctggtctcaaactcctgaccttgtgatccactcaccttggcctcccaaagtgctgggattacaggcatgagtcacatgcccagccctaagcatacttttataggcattttatagtgtcattacttttagatccagtgctttcattctagggraaaatttaaagtctggaaaggtagatggacacaggtaactcagcctccagtgaaatttatgatcttggctaaaacatcagtaaaatgggaacaatgaattttatctcataaggttgtagtaagagtgatataggtaacatttacaaagtgcttaggacattcttattgctcctggagagtgaaggctattcccttctgcaaaagtaaaataagtttcatctcaagacttttcctaatatcaactcctgaacagtgtttgcctttttttaagtcatctggaagtttgggttaatgcattaatatataaaatatgtagatatattatttatatatttatctttagttattttcttttgtctgagtgatagttcagtaatggttacaactcgatatcaagtggacactattgtcacttgtaacttaatgccaagtggtaatcccttgaacctcttaagtataagtgttctagtgccccatgaatgagttgaactgtggctcatattaacacaaagataactaagagctctctaatgaaatgagatcactgattttttgtttttgttttttgtttgttttttgagatggagtctygctctgttgcccaggctagagtacagtggcatgatcttggctcactgcaacctctgcctcctgggttcaagcaattctccctgcctcagtctcccgagtagctgggattacaggaaactgccaccacacccgtctaatttttgtattttttagtagagaagggtttcaccatgttggccaggctagtctcgaactccttacctcaggtgatttgtctgcctcggcctcccaaagtgctgagattacaggcatgagccaccatgcccgacagagatcactaattkttaatgtcattatttgttaatttttcatgaaatacactgtgatatagtgtaataagaactaatcattaaaatcattttactttattatcatctttcaccaagaaaatagaaaccaacaaagacagacaatgaagggaattgtcatgaacaataccatagagggtatttaagctaaaatactttattattggttatactttaagtccccaaaattataatagttatgaattgtctaaagaatgtcttattaattcatttaaccaagacagttatttcctgtgtgttttggatatgagtttcaggcaaccaacaggcaatgagactatcatttgatagtgtcacttgtgcttggacaagaaragaaggcctacaagaaaaagtaattaaaaacaatctctatcatggccaagttaattgaccttttaatataaagttaattgaatttctaatgcaaatttatccagatgcttataagctatctagagaaaggaacgtttggcctgcacagtgagtccttacataaaggtgcacatggaagctaatacagagaacttaacaaaataaagggaacaactcttggagttcttctgactgagccctaataatgtattaataacaaactccaccttggggagaatgtgggtgccctttaaggtcacttttcataagaaatcaatcagaaatgtaagaaaaactccaagaaaaatttaagttatatatacttagctttcactacccaactaagttatatgaaatcaaaagcaatgcatttaaaatccctaggtctaggtgtctgttgcttgaaagaacagtgttttgaggggaaaggacactctacttcagttagtttgagtgctcatgtagcaactgggagatggttatctaatcacctattatggcctgactacaagcatcaggcagaacaatgcattactatacagcaaggaactttctatccttgccttagagaaatggtctccccacatattctaagatctacagggtgcctgagagttttgtattgtcccatggcttgagtatccttccaaatcattcattaaactccagtccctagcaaatgaggtcattgatcctgttcactcctttgtgctcagctcctgtaatgtatctcatagggtcccatttctgtcttagtttacaggttttattacctcaagtttctttccttgtttgcacagatagataggcacatggctttggtgcaaatattctctaagcattcataatggtgctaccacttctcccaccgtgcttcaaaaacacacaaaagaaaaccagctaaaagccttcctagatgaaactgctacttttataccacttaattctcatggttttttttgggggggggtggtctatttgatttttttcagaaacatgagcagggaggggatgcacatatgccctatcgattagcctctcctcttgagtctggtgtttgtgtggaaagagttttcatagtttaagagagattgtgaggtttttgcaaaggtgcttggcacttcagtttagatgcgaagcaattattagggctctgagaagttcaaaagaaaggtagatgactctgagtcatctaccatatcaataaattataactggtaaataacactgttatccatagattacacattctaatgttaggaaaatgtatgaaataaatattatatgaacccaataggaagaaagagaggaaaacaaaccatgaacagaaaaacagaccatgtagcttttacagagaccaaacttggaagtgtaaarttatgcatgtatgttcatgtatatgagtttgtgtgctttaatgagacaaaatgagtggccagaattgctttattcagggtcttgaagtattcatgttgttaatttctgcaattgtttttaggttttgagagtaatgcatatattctaaatctcatagaacatgcttctgggtccatcaacattggtgcttccttaaattaaacctcttgatgggggttttcattattattcaacctctaatgagtgttgtcttcatgctagatggtacgtgggaaaaaagaaacccatattctttttggtaagagagaatgctattaatttacagtgcatatatttatacctgaaaacatgttccagaaagcagtcacggccaatgtgttctccttgctctgggctctgcttaaaggataatcattttatctgtcccastgtttggttcttatgttcaaatgccagaaagttttttaagagttagacagagctgtaactcaaataatcacatttaatccagcttcstacttctattttcattaacctattgtatattaactcaaccactataccattgctataccaataattgtatatacatttatagataaattttttaacccactcaagcaactcatatatgaaatacaggtgttatcaaccctcataatattttttgtaataatttttctgacatatgttgagaccagtttgatgggtctcctgttctgcagcatatagacaccagcatttctacagaggttaaaacctagaagaaaatttacagaccatcaacactctcacttcacaaataagaaacctggggaccatcaaggcagaagaaaacccagatctcttgactttagtccagtccaacaaattgtactaaacagatttaatagttaattcttaacctggtaagggagaaagtgtctgagacagctctcaatcaatttagaggtttattttaccaaggttgaggatgcaactgagaaaaagagacctaggttgcagtagcatctgtgatctgtgctttttccaaagaggtgtttgaaggcttcaatatttaaagggggaagagcagcaggagagaaggaggaaagaaaaaaatagggagggtagggagtaaggtaagtggtcactttcttgtgagggtttgatcagtactcactgaatccacatgttatatgtaaaaggaggggggccacatggagaaatagtggccttctgtcattgcacctatctgtttaggtacaaaagggaaggcagtttttgtgtgacccagttctcaagtgtaactcttccttttaacatagtgagtttggagtcccaggattttattttcctttcacaggagagattaggtacttagcaatgactagctatttgaaaatctaaccttatcagattattaaccttgtctcctttcataaataacatgttaaggtaacacagaagcttaatactttaagctgattggatggcagtagaatgaatgtaattcaagtaggaactggaagatccagtgtgtcaggtttagaaactaggaggtggcaggaagcaaaggttaatgtttaccaatgatccatagtaagccaacagtacagatcaacaaacttaaaatgtgtgagaaaatacagggaattgaggtattttttgcttggaaaaaagaatttgattgtgcttattgccattttcgtatattttctgatgggcaaacaatagaatatttgccctcaaagcsccaatggttgaaagcttcagagagtgatttcttggctcagtgtaagagcctgttggctgggcctggtggctcacgcctgtaatcccagtactttgggaggccaactggggccgatcacctgaggtcaggagtttgagaccagcctggccaacatagtgaaacccggcttttctaaaaacacaaaaattagctgggcatggtggcacacacctgcaatcccagctactcgggaggctgatgcaggagaatctcttgaacctgggaggaggaggttgcagtgagccgagatcgggccattgcactccagcctgggggacagagcaagactccatctcaaaaaaaaaaaaaacaaaaaaaaaaaacctgtctataaatagaaaataacttccactccttgggagataaaaagtcattctagtggtgtcagcacaggttggagaaatactttacagatatgttatggaagggacttaggcactgattttcttgtgtgtttgggccatcaaacgtgctttcagtcttgaaatcttgttttatgagtcaccttctagaaaagaggtaggaatatttttcggagtagtgtggctattaccatgtttgctgtattgaggaagcggtattctaatggggtttctagacctgcagacaactttgggaatggattttaattgcttataactaaaaatgagtaaaaactagtacttatatgcagcatcatagcagttaactcctttaccagaaggatatagattataatcataaactaatctacaagatttagaactactttacataaacacagttatagtttggggcatcattttattaaaggcatttgttaaatatatgattaaaaaataaagtattcttcataaataattttaccaaaatagcttaccccattgtattgtatttaaaactttcagtgagcattgagctattgttaaagacagataagttacagattcaagagaagggagcatagtgttagaacactggagtgattgtcattaaaagcagagtaaacaagattgttttggctaattcaataaggttagaaacagcaaaacaagggataatgaaccaagtgaggacaaaactatcattgcagattaaatgactgtatacttacaaaagcaaataaacttagttctaaagccttataattaataagaatgcagcaatgggcttaaacaggtaaaatagaaaaaaagcagtatgttaggttcttattttgttttgttgttgttaacgtttgagtgttttccattcccaattttgattatttacaatctacataaaagtccatggcatgtgtttatctgtaattttgctgaagggcaaatttgtatcttgccagtttttgtgccattttggtctgcaatctcttaatcagtgaataagtttcctcctgacagtcatgctgtataaaactttgcaatttaatatacacagtcatgcaactctggtgtaggtgacttgttgttatcttcattttatagatagtgaacctaataatatatgcctgaaggggattgggggggttgcagggattgagatcaattccttgggtctccttcagcttgatctctattaacaataacaatctgagagaaacgacgaaaaaatatttggttaattagctaataatatattttattcaaaatataaaaaatttaaagaaaagttcaaatgtttgctaagaataattcaaaaagacttaaaaagctaataacatataatactgatgaggttacagtgatatggaagttttcatgtgcaaaaggtaaaggtatgaaattaaaatttccctgaaagtaatttggcattatatagcaagaacagttctgattttcatctaatatgccctggcctggccctgctggttgttaaaaatattgaaattcttgataaacagctactcttcttccatattatcacagccccagatacwgcttcagtgctttctcctggatatcccaccttgcctccccrccccccatctccagggctccagcaattggcctggccttgccagtccaggagggctgctaggactgtgctacagttcctcagcctgcatcctttctgagcacctgccacccttggacttgagctttttgtggtggttgttattgttgtttatcactgtttttaaaaatatcatcasagatcaagagtcttattccaatcattaattcccattatggaaattaacttaaaaaagtaagatttttgcacaaaaatttatggctcattttcagtctcctcacaataccaaaatatctaaaactatatatgagaccaacgatagtgaattttaagtatatttatatacgtatatattaactatactatagttatgtatgtatatattaactgtaatataatattacataattatataatatatgattatataatatagtattatacaatacatatgattatataatatagtattatacaatacatatgattatataatatagtattatatacaatacatatgattagataatatagtattatacaatacatatgattagataatatagtattatacaatacatatgattatataatatagtatatacaatacatatgattagataatatagtattatacaatacatatgactagataatatagtattatacaatacatatgatataatatagtattatacaatacatatgattagataatatagtattatacaatacatatgattagataatatagtattatacaatacatatgattagataatatagtattatacaatacatatgattagataatatagtattatacaatacatatgattatataatatagtattatacaatacatatgattatataatatagtattatataatactttataattatgtaatatagtattatataatactttataattatgtaatatagtataattatataatttagtattatataatagtcttatataataaatagtataaagtatactccatattacataattataataggtagtatacataaaataggtaatctattatattacatataataagtaatatataatatatataattggtaatacattatataatattcttatataatatactatataggcatactataatagtaaattgtataatatatagcatagttcatatatgtttatagtatagttatatatattatgtgttatatatagtacataatatataaagtataatttatgttatataagacaaactatatgtaaaattatatattcacatataaaatatatccatatatatttccatatataaagtatatataaatacaaatataaatgaattttacataaatgtatacttttatttatttatttatttattttgagacggagtcttgctctgtcgcccaggctggagtgcagtggtgtgatctcggctcactgcaagctccgcctcccgggttcacgccattctcctgcctctgcctcccgcgtagctgggactacaggcgcccatcaccacgtttttagtagagacggggtttcaccctgttagccaagatggtctcgatctcctgacctcgtgatccacccaccttggcctcccaaagtgctgggattataggcgtgagccaccacgcccggccatacttttattttatttatattatatatgaaagattaataattaaatgaattatttcacatgtccatttaagagaatatagtatagccactacaaataacacattaaaataaattttgatatattcatagtttaacactcaagagaaaggcaaaataatttatatacataataatctcacctagatagactaagaaaaaaattgatttgatcaatggagaaaaataaaagtttaggaagcagtgagatgtttcttttctactttttacctttctctatgtcctgagttttctgcattattaatttttagccagagagagaaaaaaacaaaactataattttatatacgagagatgatggtaaggactagacctccggcctctccttcatctccttcagctaaacagctgaagcccaaagcactgctcccacaagtgtgttttcctgacagtttttcttcagaagattttgattcacctgtaacaggttttttttttttttttgagacagagtctccctctgtcacccaggctggagtgcagtggcacgatctcagctcactgcaagctccaccacccaggttcatgccattctcctgcctcgccctccccagtagctgggactacaggcgtcagccaccacacccagctaatttttaaatattttttagtagagacggggtttcactgtgttagccaggatggtctcgatctcctgacctcatgatcctcccatctcggcctcccaaagtgctgggattacaggcgtgagccaccatgcccggtcctgtaacagttttatacctgtgcaaatatttaaagagcaatcccagctatgttgtagattagcagagcttttcttcagagcctatagattctcagtgcctagcaccgagtatacttcagctctgaggacagtgaggatgatgctgatcaagagaatggtggctatcctctgtttcttgaggtatttgttgtatcttttctgagttttccatcaaatatctgtacatttcagtcttcagcaccctttgaagcattttctctaagtttgtgttttgtagaacattttggttgcatgacttttcttagacttcctgatgttgcaaaaccctcaggcagtagatttcctgggccaagaaccagaagacacatgaaaacaaatggcaacacccttttgactaagaatttatatttataacccccttcttgaaactctacagctattttaatattttatactcatattttcatatagacagaactgctttaatactgaggtacccagggtgttggagggagatagagagagaaaaagagaagtaaagaaaagaaaggatcttgtcaggaatcttctgtctttcatattgcagttcacaatcagattgttctttctctggctgcaaacccacacctgaaattatttttcatctccaagcacggagttatatgagcaatcgctcttcctagaaaccattttttttctgcctgatattctagtagagggaacaaaaatgataataatcttaatgcaacatgtaatagaattaaatttttcctgctgataatatatattttgatatgagaaaagaagcagggataggctgaaatcgaatggcaggagatatggccacagtcttyaatcccctattttcttgacctgcagattgtctcattcggggaagctccagggttctcaagcggaattcgtgtttcattttgtgtagcacccgtcagaaagacaagccaggcatgaggatccatgatgagcgctcttctgagttgccatttggagctgcccgtttagaaagcaaatctgcatttccctcattcctagtttccttcatcctcttttaagtgtcatcttttccatgaagcctactagatcacacagttgaaaattgcaaagtcttcacaccgcagcttcccctttctttgttgctttggttttctccgtgggacttcccaccatccgtaaaattaggtgtttttgcctgttttattcactgctacgtctccaatggttagaacctgacatttagtgggtgctcaataatatttgttgaagtaatgtataataacttcactttcttgagtaattactatatatcatgaactgtggtaaattatctccatataatgcctgtaatctttacaacacctctaaccctataacataaaccatgttatacccattttacacatatgcaatttaaaggacagagagacccacacatttgcataggataattctagtgaataagaaatttgcgttcttttgtctctctacaggcttcttcttattattattatcactattttgaaacagagtctttctctgtcacccaggttggagtgcagtgccgcgatctaggctcactgcaacctccgtctctcaggctcatgtgattcttgtgcctcagccacccgagtagctgagattacaggctcacgccaccacgcccagataatttttgtatttttagtagagatttcaccatgttggccaggctggtcacgaactcctggcctcaagtgatccaccagcctaggcctcccgaagtgctgggattacaggcaggagccactgcgcccagccttaattttttcttttcacgatttttttccattttaaattaaatgcctttggattttaaaaaatgcaacattcctctgctatcttattaaacgtatccttgaacttcagggagtggagaataggtgtctggaaaatgagacactgcttttctttgtttttgaacttaacaagttccacattcagagatctcaattacatgcccttcattgaatgtaagtgtgatgcatttaacatacagcttgtgtgaaagcaggatattataaccacaaacatatctgactttaaaattaagtaaaatactcaacatagcccagaatggaaacatgggaattaattctatatctgtggcagatctgagggacacggtggtaccaaaaattgagatttacagagaaggagatttttaataattcagttttcattaacttcccaaatcagaaagccagcatattctgtttggtaggaaattacacaggagtgaagaaaaaaatccacaattcagctgattagaaaacaagttttcattaaactaaaatttattgaatttttaagcaatgtatagccagctagcttccaaaaatttgctcatcgatattgcttaataaaaagtgttttctttccctttatatgctgtaataacataaactgcctaagtgctattttggaagctgaatcatagaggggctaagtgttatgaaggcttattattttccagacactttgctagccacttgacatatgtaatcacattttattctaatggaaactctgtggggacttcctttaaaaatgaaagagctgaggttcagatattttgaggctcagatggtttaagatgcatttcatcaagtaatagacggtggagccgatctccaagcccaggttggatttttcctgaagcgcatgattttttcctattatcccaaagcctcatccataaatatcatgcagaacctatgtagttgctcattatagagaaagttctagagcctaaagtagtccaaagtaagtgacccaaaaccaggaagacagttaacagtagaatacacagacttgcccaaggggtatatcctccacatcctccacaaagtatttcctgctcttcttcttggactcagcctcccctgtcctcactacagtcactaactctgcttttgtattttcactgtttgccctgaagaattccattataccattgttgtaatttattgcacttaatgtgttttatgtttccgattaccaatctgtacatttttattctcctattgtatatttttatacaatatacatatagtgtatacaatatatattgtagggaacaaaaaaaaattccccctcaaccctcatgaattcttagytgggatgggtccctataasaaaagatagattaataagagggaaacaaacacgtttattaacgtgcagtgctcatcatacaggatacactccaaggaaaagtaactcgaagtagtggtttggaactctggctcatagagcatcttcaacaaaaaacaataaatttgtggggaaatgacaggacaaaggaaaattattttaggcttccaagggagggaaactgtgggaaggtaaatatatgggtggaaaatatgagtaagtttgtttgcagattcctctggtgctgtctctgggacggtaagagtttagagttgtctccagtaaaggagaatttataacctgcccttaggcagaagagtaggaggatagggaaaattttccttccatttgctgcttcttaattgcctttagctcaaaaacaattttcttgtcaaagaggcagatgtcgaggtgacctattctggtttccctcaatatattactctttcttgcattgtcatggagtactataccctgaagattaccgtattgctaagtattgatctgatctatggattctgactgttacagaatactgagtgttgtgcatccaccacaatttttctgccttataactttccatctaactcccttctatcccaagcaatgctgtagtgaacgtggttcagtatctccttatccacccatgtgagaatttctttggattatgcatttttattacattctcaattcagaactcctgggtcgtaggttatgcatatatttaatacgaataagtattaccaaattagtccccatagtggctgctccagtctatattctcagtggcctggatgaagtttctctatctgaatatccctgacatcacttagcattctttagctttctgatgttttgcaagtccaacaagcatcaggtgatattgtattgccattttaattttcatctctttgattattaatgagtttgagcaatgtcaatgtgcctattaactttttaagaaattatctctataagcccaacagtgggcatttcctggcatataatggatccttagtggatgtatgattgaaagaaagacattatagcatgcaaaattcccaaattagtctcaggctttgatttttgatacttgttggttatctcgaaatctgaacactaagtaaatattggaattaagtttttgaggtaattaactatattaatcagttgtcctgattttacagtcgaagattgttggtaagtttgacatagggaaattaaacttaaaaaaatcataaaaataacattttttaaaagttaccatatgatgtaaggagtgactgtgagttatattttcccattttgtagatgagcaaatgagttcaggagagatttaaataccctatgaaaagcatgcagaattctggtagcactataaggataaataaaaagattgggccatttggctagggctggcatgagttaattataatcattatgtgattaataaaacatttgacataccagcaatcatgtcatgaagttctattctctgcctttgaatagtagcaaactaggattataattttataatgacagaccagtttaagatagaagagacatgacacgtaagactctcagcttctcactatctgcctaaaacgtgcatggacaaaattggtgtgtgctaaaggcagtgccacaggaaccgaaactaaaaaaaaaaaaaaagattaagaatgtataaaacygctctaactccatcccttgactgccttgggatctcaaatagcagaaatgtatgtccatcaacaatgcaagtggaagtgtatgtctaatttaaagccgtgtcctaagaataggatttcacataatgtgctagctaaagcgtagagggttggtagagcttttgttagggatttccttgcagcctatcttcacatcctaccctttaaacatgcttttttaaatgtaacagcagagcacctagaaaacctatttttccaagttgtgacttctctctttcctacatacttttattcttctagtcatccaagtaactatcttactagtagcagtctgtgagtctgtctatgcattcatgcatccrtctaaccagctgtctacctacttatccatattttttaagcaataaaaatttcattttgtagcctcttttactagtgcacttgcccagaacagacagtctcccactcagaagaccagttctttgagtcaccagataaagttcatatatgatataaggtatagtcacatcttcagtatactaacatttactataatacagcaatgccttttaaaatcaaatacacgtgattttacaaaaccaaatgtaagcctccaggatgtaagagaacaacttgcattataaagtatccttgaacccaggaggcagagcttgcagtgagccaaaatcacgccactgcactccagcctgggcgacagagcgagactccatctcaaaaaataaaataaaattaaaattaaataaaaatgtttaattagatacataatggtaaatgtggtactagtgttagtggtaaatatggtaattagcgtagagaggttaaatgattacagtaagctaaaggccaaattgttgttaatttgagttgttttatatatgttgataaatgccttggaatagtcacttgcatacaaaataataaaagaaaaaatttagacctgtagtaattagtcagggttctctagagaaacagaaccaacgagattatatatatataatataaatacaatttatatatatataccttaatatgtaaaataaggaattagcttatatgattatgaaggctgacaagtcccaagatctgcagtcggtaggctggagacccaggagagcccatggtgtaagttctagtctcaaagccagcaggcctgaaggcttgagactcaacaaaggctgatatttcagtctgagtctgaaggccagaaatgaccagttccagctcaagctgttctcttctggtcttggattgattggatgagggagggcagtctgctttactcagtctaccaattcaaacattaatctcatccaaaaatgccctgacagacacacccagaatcatgtttatccaaatgtctgagcactccatggcccagtagagatgacacataaaagtaaccatcacagaaaggttttctaattggaagataaacacttcgaaaataattaatttgaataaatttttatagaaacatttcaaattatagataaaaaaagaaaattaaaaataagctataattctatcgccattagataactcttgatttgaatttggtgcatatctttctaaacattgtatattgaaatgaagtgctgtgtatcccattgatttatgctgatacatacttggatttgcccagctttgctaaaattacacacaagggatcaattgagaaaatcagttacatcatcatcacaagcacagaatgaaaaatcattaatttgccttgctattcacagaaggggagaaaagaaaaaaagaaagaaaatactatgatatgtttgaatagagtttgtttaatcatcaaaattatttctctatttgtcacagaaaatgctgtagcctttgtttctttagggagaaacatttaatgtcatttcttaatagggcttttgttaacccaaacagctgttggtgtgtatgtatctaaaggccttagggggtcaaaaataagtagccttcaatcatcagagttatgaccaagcaatggtcatgagaggtcacatgtgggaagagactgactataaactgagcatgtattgccctactccccttaaatgccattttctggatctcaagtttaagattcctagaaagttttgcaatgtacaataaaagtagattgctgcttccacatttttttcacttacccctgaatttgttgagaatttctgaattatttgactcaagtctagtttactttctgccattattttgacacattagtttggcttgtgttctctctgaaagcatttgtaaggcattccatacctgattctggaacatagtcataacattgtgggtcctgctctgaargattcagttagaaaggacaatggccactttttttttttttttttttttttttttactttgaatctcttatactgatggcttatggttctatagggtatagtaacccctcatatgcctgcaaagattaatgatcaaatcagctcagttattcaatccagcatttaagtatccttagttctttttaacaaacttgttggaagcaagcctttgctagtacatcatataaatgaagaagagcaataatttagatcaggaaagacaagtgtgttttatctgtgttgccaactccagtcaattgatgggtagttagtgtctggaagattctcatgctgcttctgggctctgtgggaaagaccactaagattaccagctatgagtggtagagttttagatgtgtaggagttagccagctgaagtgaagaagtgagggagacctttttaggcagaggagaaagcatgggagaggatggtacgtaaaggaaagagggtagaatgcaagcaattcagggctcctggagccgcaaaattcagaatataaaactgtgagtgatgagaataaggaccaggccagatagtctatgtttagtggagaagcttgaccttcatccattttatagtcactagaagattttaagcagggaagtgataggtttgcttagcagggtttaaaatggttatcatggtaagtgctttgaggaatacaagaccagaggtaggctgaccttttaggatattattgcagtattccaaatgtgaataatcttgacctgaataagagcacagctagtagggacagaattgagaaagtaaacttcttgatggccaggaaaggaagataaaggaagaagaaactttgagtgatgatggatagcaaacagcatgggtgaatgtttmaagaaaagataatactttaaaactaaatgttaaatggttaaacaagactataatatgacagatctgaactattgacccccctttttttaaacaggcaagaggattatatacatctttttgttggccggacgtggttactcacgcctgtaatcccagcactttgggaggccaaggtaggcagatcacttgaggtcaagagttcgagaccagcctggccaatatggtgaaaccccgtctctactaaaaatatgaaaattagcctggcatggtggtacgtgtctgtaatcccagctacttgggagggtgaggcaggagaatcgcttgaacctgggaggcagaggttgtagtgagccgagattgcaccactgcactccagcctgggcaacagagcaagactgtttcaaaaaactaaaaataaatatttttgtcattgttgttttattttaaagaaaggttttttaaaggaagtttagggtttgcagataaattgacagcaaggtacagagattttccatacaacccctgctctcaagcatgcattgtctccccattatatatatattccctcccagaattacaatctgctacaatttataaacatccattgacatataattactagaagctcatagtttactttagggtttccttttggtgttgtattccacgggtttaaacaaatgtataaagacatgtatccaccattacagtattatacagagtagttttactgtccccgaaatcatctatgctccaccccttcacatccacccctcagcccctggcaaccactgatcttttcactgtttccataattttgtcttttccagaatgtcatctagttgaaatcacacagcatgtaaccttttcatattggctccgttcagatagtaatatgcatttaagtttcttccatgtcttttcatggcttagtaactcatttctttcttgtactgaatgatattctattgtctgcatgtaccacagattctttgtttgtttgttcttttacttatcagtttatatgctgaaggacacatcttggttacttccaagctttggcaattatgaataaagctaataaacatctatgtgcagatttttgtgtgactgtaagttttcaactcctttgggtagaaaccaaggagcttgattactgaatcatatggtaaggttatgcttcgtcttttaagaaactgccaaactgtattccaaagtggacccaaagttacctttcccaccagcagcgaatgagagttcctgttgctccatatctttcccagcatttgttgtcattagtgctctggattttggcccttccaggtgtgtaatggtattttgttaatgttttaatttgcatttcattgatggcatatgatatgaaatatctctttatatatttatctgtcatctgtatatcttctttggtgaggtgtttaggtctttggcccaattgttaattgggctggttgttttcttatcgttgagctttaagagttctttgtatattttggatagtaatcctttatcagatatgctcttttcaattattttctttcatgcttgtcatctcattctcttgacattttcttttgtagagcagaagtttttaattttaataaagttcagcttattaattacttatttcatagattatgcctttggtttctatttaaaaagtcatcgccgtacccaaggtcatctaggttttcctctgtgttatattttaggaattttacagttttatgttttacacatagttctatgattcattttgagttaatttttgtgaaggatgtaaggtccttgtctagattcatttttttgcaggtgggtatccagttgttgcagcaccatttgttgaaaagactatctttgctccattgtattgcctttgctcccttgtcaaagatcaattcactatatttatgtgggtctatttctggtctctctattctgttccactgatctatctgtctattcttttgccattaccaggctgttttgattcatatagctttatagtaagtcttgaagtcagatagtgtcggttctccaactttattcttctctttccatattatattgsagattatgggtataaattattttttaaaaatacatgtctgctatttctgagggatactgaaaagcaaatcatgtagaatacaatgtcaaggaatattttattttatgattttatatcttatggatatgtatatatacccacacatatttatatgtacatacatatgtatatgttctgagggaaaaactcaaactttttcctctgctctcacaccacaacaatcaacacagaagacttctgtgaccaaatgcatgagttttttttttctcccaacaccaagcagcagatacttccaggtatcttccaattcaattcaattctgatgctgtctccctgaaaataatgtcagatcccacaggttgagggctcagtcccacaagactgtcccctttcagacaccagttgcaagtttgggcctccagaatttctcagtagccagcttcaagttgaggtttccacaacccctctttgggtttgattaatttactaaagtggttcacagaactcagggaaactggcttaatttgctggtttatgataaaggatgttacaaaggctacagatgaagagatgcatagggtaaggtatgagagaaggtacacagagctttcatgctctgcctggatatgccacctgccaggatcctacacatgttcactatctggaagctcttcaaatcctgttctcttgggccttttatgaaaacttcattgrataggcatgactgaagcatggacaaccatgtagtaatgtgattggaygaaaaggttataatctaatgctgataggctgagtgggaaaacccagtgaggcctatctgttcagattcttcttgatctctctgtgcagcattaattcctctaggatatgggacaggacctcctctgaaatgaggtcttatgaccctcaatcacaaaggtggaaacaygttatagtcctgccttgtataggtgaaaggttttctgaggtctgctcctgaggccaaaagcaccataaaattataataaaagactattaacaagggctatgggaatcataagccaggagccatagataaaaacatatagatatataaaataatatcacacacatatatcgatctatgcatatacacacatttctataaagatacatatatgtatgtaaatagatagaagtagatatttatatagctagatatagaagtagataattgtattatttattacatatatatcacaataagaaatactatacttattataaaaataacacagggcggggccaagatggccgactagaaacagcagcgtttggaggcccccattgaaaaaaaacataagcttgtgaatacttcaccagcaaccaaggcatccaggttctctcatcagaactgactaggaggttggtgtgacccacggagagaaagaagaacagtgtggtgtggcagcccacatgagagccacatggagtgggggagccccctccccccagccaagggaggcaatgggtgagcgtgctttttccacagaattgtgcaacccacagattggaagatcccactcgcgaacccacaccaccagggactagcgtcccaacccaggaatgcacagactcttagcttctcggttggaaggaatctgcttaagcctacggaactcctggagggaggggtgaccagaactgggtgtggctgcctgctgtcaaagctatttgagctccttgtgggaggagcagcagccagtactgggatttgcatctgcctaacacaaagctccctgggcaggggaagggaggcatccatctctatagccccaggctgtgcttttcctctgttggagacagggaggctggacggcttggtcccaagacttgtccctcacagtccaacacatctgcttgcagtctgtggccagagtgcctcttcaggcctgaccctgacccatccttcctcattgggtgaggcttcccccaccaactccagtaacaccagccagaggctcagggacagaacctgcatctccctggtcctgtgtccctagggggagggatggctgcagtctctgtggaccagcagacttagcctttcctcctggtagttctgaggaatccaggcagcccagacaagtgggttccccgcaagtgaggcactgtgttaaacaggttctgttccccatgccacccaactgggtgagaccctccaatagaggttgtcagacaccctatacaggagtgctcctactggcatcaggctggtgcccctcaaggtcagaagtcccagaagaagaagcaggcactcatctttgctgttctccagcctctttgagtgacatctccaggcacagcagcgaatcagataaataggtcctgaagtgaacccccagcaaactgcagcagccctacagaagagggacctaaccattgaaagaaaaaaaacaagcagaaagcaacaacaacagcatcaacaacaagaacaacaaaaagtctccacaaaaactccatccaagggtcagcagcctcaaagaccaaaactagacaaactcacgaagtcaagaaagaatcaatgaaacaatgctgaaaacccaaaaggtcagagtgccttttgtcctccaaatgatttcaacctttctccgtcggggtaacagaactggagggaggatcagatggacaaattgacagaagtaggcttcaaaatatgggtaataaaaacctacactgatctaaaggagcatgttctaacccaatgcaaagaagctaagaaccttgataaaaggttagaggaattgctaactagaataaccagtttagagaggagcataaacaacatgttggagctgaaaaacacagcacgagaacttcctgaagcatacacaagtatcaactgatgaatcaaccaagtggaagaaagratatcagagtctgaagacaagactagagaaaaaagaatgaaaaggaatgaacaaagcttccaagaaatatgagacttcataagaagaccaaacctacaattgattggagtccaagaaggagatggagagaatggaaacaagctggaaaacacacttcaggatattatccaggagaacttcctcaatctagcaagactgccaacatgcaaactgaggaaaaacagagaacatcattaagatactccacaagaaattcaaccccaagacacataatcatcagattgaagattgaaatgaaagaaaattgttaagggcagccaaagagaaaagccaggtcacctacaaagggaaacccatcagactgacagacctctcagcagaaactctacaagccagaaaagattgggggccaatattcaacattcttaaagaaaaaaaaaattcaacctagaatttcatatccagccaaactagcttcataagcaaaggagaaataaaatcctttccagacaagcaaatgctgaggaattttgttgttaccaggcctgccctgcaagagctcctgaaggaagcactaaagatggaaaggaaaagccaggagcagccactgcaaaaacacatcaaaatataaagaccaatgacactatgaagaaactgcaacaactagtgtacaaaataaacaaatagcagcatgatggtagggtcaaattcacacataatgatactaaccttaaatgtaaatgagctaaatgtcccaattaaaagacacagtctgacaaatcggataaagagtcaagacccatcacccatcagtgtgctgtattcaggagacccatctcatgtgcaaagacatgcataggctcaaaataaggggatggaggaaaatttaccaagcaaatggaaagcaaaaaataagcaggggttgaaatcctagtctctgacaaaacagactttaaaccaacaaagatcaaaaaagacaagggcattacataaggtaaagggaacaattcaacaagaagagctaactattctaaatatatatgcaccctatacaagagcacccagattcataaaacaagtttttagagacctacaaagagaggtatactcccagacaataatagtgggagattttaacaccccactgtcagtattagatcaatgagacagaaaattaataaggatattcaagacttgaactcagatctggatcaagtggacctagtagacatctacaaacctctgtaccccaaatcaacagaatatacattcttcgcaatgccacttggcacttattctaaaatctacgacataattggaaataaaacactccttagcaaatgcaaaagaactgaaatcataacagtctctcagaccacagtgcaatcaaattagaactcaggattaagaaactcactcaaaaccacataattacatggaaattgaacaacctgctcctgaatgactcctgggtaaataatgaaattaaagcagagatcaagaagttctttgaaaccaacaagaacaaagagacaacataccagaatctctgggacacaactaaagcagtgttaagagggaaatttatagcacttaaatgcccccatcagaaagcctgaagatctcaagttgacaccctaacatcacaattaaaagagttatagaggcaagaacaaatgaatccaaaagctggcagaagactagaaataactatgatcagagaagaattaaaggagatagagacccaaaaaccctccaaaaaaaaaatcaatgagtccaggagctggttttttgaaaaaattaacaaaatagattgctagctagactaataaaggagaaaagagagaaggatcaaatagacacaataaaaaatgataaaggggatatcaccactgaccccacagaaatacaaactaccatcagagaatactataaacacctctacacaaataaactagaaactctagaagaaatggttaaattcctgggcacatacaccctactaagactagaccaagaagaagttgaatccctgaatagaccaataacaagttctgaaattaaggcagtaattaatagcctaccaaccaaagaaagcccaggaccagatggattcacagctgagtcctaccagaaatacaaagaggagctggtaccattccttcagatactattacaaatgattgaaaaggtgggactcttccctaactcattttatgaagccagcatcttcctgataacgaaatcaagaagagacacaacaaaaaaaaggaaacttcaggccagtatctctgatgaatatcgatgggaaaatcctcaataaaatactggcaaaccaaattcagcagcacattaaaaaaaattatccaccacaatcaagtcagcttcatccctgggatgcaaggctggttcaacatacacaaatcaaaaaacataatctatcacataaacagaccgaaagacaaaaaccacattattatctcaatagatgcagaaaaggcctttgataaaattaaactactcttcttgttaaaaactctcaataaactagatattaatggaacatatctcaaaataatgaaagctatgtatgacaaacttacccaaccaatatcatattgaataggcaaaagctggaagcattcctgttgaaaaccagtacaagacaaggatgtcctctctcaccactcctattcaacatagtattggaagttcttgccagggcaatcaagcaatagaaacaaataaaaggtattcaaataggaagagaggaagtcaaattgtctctgtttgtagacaacatgattgtatatttagaaaaccccatcatctcagcctaaaaacttcttaaactgataagcaacttcagcaaagtcttargatacaaaatcaatgtgcaaaaatcacaagcattcctttacaccaacaatagacaaaaamagagccaaatcatgaataaactccaaatcacagttgctacaaagagaataaaatacctaggaatacagctaacaagggatgcaaaggacctcttcaaggagatctacaaagcatttttcaaggatataagagaggatgcaatcaaatggaaaaacattccatcctcatggataagaagaatcaatattatgaaaatgaccatactgcccaaattgatttatagattcaatgctattcccatcaaactaccatcgacattcttcacagaattagaaaaagttattttaaatttcatatgtaatcaaagaagaccacatatagccaagacaatcctaagcaaaaggarcaaagctggaggcatcatgccacctgacttcaaactatactaaaagtctacagtaaccaaaacagcatgrtactggtaccaaaacagatatatagaccaatggaacagaacagagacctcagaaataacaccacacacctacaaccatctgatcttcaacaaacctgacaaaaacaagcaacggggaaaggatctcctattcagtaaatggtgctgggaaaactggctagccatatgcagaaaactgaaactcgaccccttccttacaccttataacaaaaattaacccaagatggattaaagacttaaatgtaaaacccaaaaccataaaaaccctagaagacaacctaggcaataccattcaggacataggcatgggcaaagacttcatgacaaaaatgccaaaagcaattgcaacaaaagccaacatttacaaatgggatctaattaaactaaagaacttctgcacagcaaaagaaactatcatcagagtgaacaggcaacctacagaatgggataaaatttctgtgctctacccatctgacaaagatctaatatccagaatttacaaggaacttaaatgaatttataagaaaaaaaaagccaccccatcaaaaactggacaaaagatatgaacagacacttctcaaaagaagacatttatgtggccaacaaacatatgaaaaaaagctcaatatcgctgatcatcagagaaatgcaaatcaaaaccaccatgagataccatctcaygccagtcagaatggcaattattaaaacatcaggaaacaatagatgctggcaaagccgtggagagataggagcacttttacattgttggtgggaatgtcaattagttcaaccattgtggaagacagtatggagattcctcaagaatttagaaccagaaataccatttgacccagcaatgggattgctgggtatatacccaaaggaatataaatcattctactataaagacacatgcatatgtatgctcactgcagcactatttacaatagcaaagtcatggaaccaacccaaatgcccatcggtgatagactggataaagaaaatgtgcatatacaccatgttatactgtaaagccataaaaaagaatgagttcaygtccttcacagggacatggatgatgctgggagccatcatcctcagcaaactaacaggaacagagaaccaaataccgcatgttstcattcataagtggcagttgaacgatgagagcacatggacacagagcggggagcaacagacaccagggcctgttgggggttggggttgaggggagggaacacagaagacaggtcaataggtgcagcaaaccaccatggtgcatgtatacctatgtaacaaacctgtacattctgcatatatattccattctttctcagaagaaataaaaaaaagcacagaatgtaatcgcctatgagcacagtggtattatttattgtccaatgtagggtactttagagaattagttggaaagagtaggtaaaataattaaaattattataatttttgaaatttgtatgcattgaacaaatttctcatattagtaaatttatgaaatgttcttttttaaaaactacttccaaaactaaaattctgctaatgatattttattaaaaatgaacaagttaggaccaaaaaacgaaagcagatggacactaagwcaacaggtataaaatggaaatgtccctgacaaacaagtatggtcaccctacttatgaggtcagaaatagattttacgttctaattgactcttaaggaaatagttgcattatcacctcttcttaaacttaatttatttttgtcaggaatccagcacacatgagcttatactctagaggctgttatgcaaaccaatggtttccatatgtcaattgtgattctagcattgtgtcctctatcagtgccccagggagagggactgcctggctctgaacatgtcccagactgtgctagatatattttgccaaccaggccaacctgaaatgtcaaggtccatctttggaggagagctcatcaagccctgaggggatataattgcatttcagttatctttttcaaaatgtcgaatttgagatcctcataattgataatttttcatttaaaatgtatggctaggttaatatgaggcaagaacagaaaattttggtctctagtcttttgggggcaagctggaatctatttcccattagcccacagctattcttaccagccttttgtcttagttgtctttttttcccttcagaatagttgctgaacagaagaataaaaggcttttcatgtctttttagcatttgtgatctttctacttcttagttgaatgagttagaagaataaacattgtagatttagacaaatgtgacttaaacttcaggtatatcaatatcccttgaatgtcaacatactcaaatcacctaatccagttgggaatattaataatatcatggaacttgctgtcaggattaatgagatgttccaggtaaaaagcctagcacagtgtttggcaaatagtaggtggccaataataaatggcagctatagtcatcagtgaagaaatacatgatttcaagtaggtagggctggctgtgaagaaaattgtcacataagtgacttcatactctatttcagcttycttcccactctccctccttccctccacacacaccatgtacgccatctcctattgtcagtacttgggactctcatatgcacctggaccactgtcttttcccagtctagcatcttctgttcctggtttatcttcctcatctctttccttccagacctcccagtcttatgacctctgcttttgcttcctgctatgtgcagccttggaaagtttctgctaatgtcatttatgccaaatgttaaagactaacatcattttcctatgctaatcttgccaggaggtatttccattttagtgaaggtcaacatcataacctaactgaataaaagtgcaaaacataagttggaggcatcagcaagagggagagaagagatattttcaaatagatgtactcaagataacaataaaaataatgaacagctaacatttattcactgccaactttattttgcactgtgcattatatgcattacttcatttaaccctcacaactaataaattaagtactattattatttttatttttctaataaaaaaaaaaagaagcttggagaggtaaagcaaattgcccaaagtcgtatacaccgagtaagtgaagaagacaggtttaaaactcaagtccatctgacttattgtcatctctcttacactaacccttacaggctgaattttcaccagggcagggattcttgcttggaagtcctgcsttgctcaatattctaagaaatctagactgctagtagttccaaatatactcttttattttctgtgtgtgcatctgtcatcttgtcccctgtacctgcaatccctcacttccccacagtttctgggctaactcccacttaccctgggagtgacagagttcatgagtgatcttcccccatgaagcatcatcactctggcatcatctctcgtcctctccccatatgttctcttccctcttcctaccttgattcaactgagccagggctatttctgtgtctgtgaacaggtaatagtgtttatgagggcagatatctgacatgtttttcttctttattttacctgacataygcttgtaccctttatttaatctgacatttttttgtactcttctggcctagcctactctgccagttctgaggtgcatttttttttcgtattttaatacctctgatattgttatgctctccagttgataaaatcttaaaattwtaattgacagtggcttttttctaacttggtgaaacaaaaataagggttaatttccttctacaatcaacagcatctttgatttgatgaaatatagtgatagatgttaaagatcatgtaaacgaatggatggcactcacagccctccttgagtcacattactatgcctacttagaacctagctgccctgcatcatggcagggcagcagttgaacattattctttatttatgttaggctttcctagtaaaggtagggcagataataaatcagctaaaattgtttttaatcatttcttgctggaatgatgtgacctgtcccatatgtttatcttctaggtgaaattgatcttcaaattctctccaaagttcaggctcaatacccaggagtttgtatcaacaatgaagttgttgagccaagtgctgaacaaattgccaaatacaaaggtacctgtaactcctggtcctctacaccagatcctatcccaaaagacttaactcaaattgttcccttgaatgattaaaaatatagttactgtggtatgcttttcacaagcttattgggagaagaactgaattagttcttggcaggcatgactaaacatctcaaaatgtgaacagtgaataataaactcccttttctattaacacttcatccattccccagttgtcatcaatgattaccttttgatgtttatgcttaagtacagattcattcattgatccagaattatttaaaccaaccttaaagagcttatgtttagtgggttacagtaaaagttcacaaacttttcctggcaaaggccaaatagtaaatattttagattcagaaggtcaattcagtctctgccataactaatcaacctgccatgtgccacaaaggcagccaaaaagaaaaataggtaaactaacaagcatgggtgtgtttgaataaaactttatttgtaaacactaaaatttgaatttcatatcattttcacatatgaattagcatccttcttttgtttttttaaatcattcaaaaatataatgacgtgaaacatgaatggcagtgacacaaagtcaggaagtagaacgatatatgtttttagcttgcggttcatacaaaaataagtagcaggctagatatagtccctggactgtagtttgtcttctcctgaattatacaaacatatctgtttccaattcactttccattgataaaattcaccagttgattcttcattaatactaagacaatataacctattctgcccagggttcttgtaattatttcttcctgactctttctttcacctctaatttcattaaatactagaaaccaaaaaaagcagtatgaactctctggtctcccagacataagaaagaaaaacgttctttctatctgtttgtatataacattgattgcattaaaattctaaatggaaatggtttccacatttgcaattaaaattgatggtgtgtcacctcttctctgtattttagagcttgtagccaagayatcgaacctcgagaacgtaaagtttgcttggcataaggagacatcatctgaataccaaagtagaatgttggagaaaaaggagcttcaaaagtgggactttattcatatgattcaagtaagaaatatgtattataatatatactcagaaagaagacttttcagaatatatatataatgaatatctactattctaatttttaaaaggtaaatgaaaatcttctgatttctaattttacaagtgaccatgatctgcccaaataaaaggtaaagatgtttattatactaagattctctttaacattccaaaaaccagttttctctaatcaaaatacctctacaagttatccatttttaaaaatgttggcttaattcttatttcttttttgagatgggagtctcgctgtgtcatccaggctggagtgcggtggcatgatcttagctcactctagcctcaaaatcctgagcttaagcaattctcccactgcagcttcctggttagttgagaccacaggtgtgcaccaccacacccaactaattttttattttttgtagagatggggtcatactatgttgcccaggctggtcttgaaatcctgggctcaagtgatcttccctcttcaacctccaaaagtgttggaattacaggtgtgagccactgcacccagtctttaatttatttttatatcattggatgtttatatagagatttgagaatgatagcatcataacatattctctagtggctctaatggtttgggtggaccaatgtcccagagtgtttctgtagtggacatatggtcgaaggggcaggttaaatgatgcctcagttcaataaatttttacttccattatccagatccgacaaactgactcatacatgttatagaaagggagtgacgcaagaacaaaaaaccaaacaccgcatattctcactcataggtgggaattgaacaatgagaacacatggacacaggaaagggaacatcacactctggggtctgttgtggggtggggggaggggggagggatagcaycgggagatatacctaatgctagatgacgagttagtgggtgcagcgcaccagcatggcacatgtatacatatgtaactaacctgcayattgtgcacatgtaccctaaaacttaaagtataataataataataaaaaaagaaagggagtgactattgagtagatagcatggggctggatttccagagataactaacatttctgaatagcataagggatgtatgggttttggaagttggttaccaacgggaaatgtacgtattttggcaataccacttgattaacgacaaaacactatttttcttcctggtctacaatgatartcaccccaaaagaataaacttacaagaagtcaaaggaagaaatactccaattgtgtcatatacaggcaattctatgtctctgcttctttagctgatgaaatcttttgcctgtcaggtagtacttatcactgtccaggatgccaagatatttctctaccagactkgcttttgttcccacttcctcacataactatttcataactcccctgtctccttaccrctcctgcaatctctcccagaccattcgttctgagccaatgacctcacttcataatgtatagagaaaatagaaactrccagatactcattttttaccctctaactttgcaaacataactgcatttgtgcatcatctccttcttccatcttattgcaaaaacctcctcttatcaaaaaccactccctctgcttaaccctggatcccattcttttctctgttataaatattgtgatttcaggaatcagcttctctttcctatttctcttaaaacttccatgtttgttccttctttcttataacaactctgtttccctctgaatctctatcctgttcctctctctycatctctgtctatgccccatttttctgtgcagcgtctctgcctctctattactcattatagtcctcacactcttatgatacttttacaacctcactgtcaattcagaaaatttcactgtctttgagaaaaatttaaggtaatcttctatggcccacttccacatttctagccaggtcatatcgtagattgttagccatcatattgattcactatatttgggtacctgcctatggtccctgtggtggaaaatgtggagtgtggcccctaaggcaccatgagccatgcacaggtcaggtccattttatttcattcattcatatgaaagaggcacagctaaagtacttttcctttgtgcaatgaattctctaaggacaggctatatggaatattgaattcttgtccaacaaagatgaagatgagatataagaagtgtctatgggggtggggtccaaagatgcaagccatggggaaaaatttcccacgtcaatgcmtaagtccaagttctgtgttgggtggaaaggcctgtacttcactagagattgatccagaattattaaaaatgggtgtcctgacccctaaacaccctgtgaccaagcagataamctcatgctttatttagtccaacttcctacagaatctgtcatcatcagaggctgtcacattttctgtgattttaaaaaagcatctgtgagcatatggagaagctagtgcaaagggcttaattgtaaagtaacgttccatgaaatggggtctgtttttatggtgccagaaccattttctcccagaagaactgcaattcacgaattatagaataggcataggattcatgtccccatgtggaatggtgactaagtgtctccagctataaatgtctgtgctatggaagccagaaagagtaaatttaaaaccatttgactctagtcgaacaaataccatacttttccatttccccaaatattttctcacattattgttctatgtcttcatgcaacgtytttaatctttaaatttcttaagtgttttcttgggtaaaaattcactcaactagaaaatcaaactttctaggagtatctagcccaagcaataaagacttcaacatacagaagcagctcatttctctttttcctcctttctagatgctgtattatgtaaaagacatcccagctaccctgaaattcttccatagtctcttaggtaccaatgctaagatgctcattattgttgtgtcaggtaagttattttcattcagcctgaattttaaaacagcaataatacacrtatgcatggattcctgtgtttgaaagaagcttatatattttgtcttcattatgaaattcttgccttggcctctaatcatagccaattaattttcacagtattagggaagtcattcacaacagttctcaatttagaaggtatagtggaattaaacatctgtctacttctttcttttgggaaaatatgyctttgtcttctatatatgaatcctttttatatagcttaaattcaactgacaaaagattttaaatgagactaaaaatagtaaacatttattttacctacttcgtgtcatttgagtgtttcttttccctctatgatgtttattartaaataaaggttaaactatttcagatgtcatcatttttaattgacttgcattcttagagccatgatcaacactgcttgctataggttttttcaaatgcctatcaaaaacagttmatttgttttgttttgtgttggtgttttattttccaaggaggcatgtgagcatgtccagttgctgccagggatttagtaagtatcacacagagaacccaagtaaacatttttagataatgaaacattgacattgttgaggacagtatttattacttctttcattcagcaatctttatggattttctaccagtacttacaggttgrttttagatacacagcagactctgtcttcctaaggttacaccagaccccatacttkaacaccrtatgtcacaaaattgacttgttcttaaatatgaagaattgctttaaagatggcaagcatggttatagcttgtaatcctgggtttgaccttatgtgaaagtttggcaatagagagctcctgtacacaacctctcctgcaagggaacatttagatatactatttttatctctatttagttaaaaatactcatttatgtgggagaggtctsatttcccatttagaagggcttatggaaactggactcatcctactaacctctctytgagctagtaaagcactataaactgcmtttagaattgcaaagtaaacttagttatcaacattgtaggcagcctattcttgatkatattcatcaatcatacagaaaaagtattgtagacrgaaataacaattcattgagaagtcatgtattttttatcttagaatatatttcatctcaatagtaggtctaatctcttatttatatttggcttattctaacatattttcagaaattaagtatctgagcacccagaagttagctttctataagtatatattaccaataagacaaagccagcctgaagtttagaagggagcatgaatagtccasaagtaactgagaactgattaagtgcccttatggctacagtattctgctggctgtatcatgaatgaattaattgatgattattggcatcaagaaatttgaagaccaaaataaacccaatgaaatgtgttgtatgttaatacatggtgcaagaatactgaggcacttttarctatgtgaatttggtctctgcatctcagtttattcaagggctatttctggacaaccttatctgcattatattacatcttttcatatatgtggctcataagtaccatctgtaaataagcattcatcataaaaaaaatcaaaagaaagggagtaaagactcaacaatcagttagctttttttgaaaagtatttttagtcaaaaattatttaaccaaagtatttgatgatggaaatgttttactcactttctcaatatgcagttaacaattcttcattactgcttatagcacaggagacagctgttccaaagaggaaaacattgttaatagaatgcaacgaataacatttgacagatgattaaagagattctgatgatctccttcctttaccatatcacttcttctgagaagagatttacacagctatagccatctatttcttcctaaaagaaaaaccacttcrcaaaagtagaagaaagatttcgatattttatttggggctttctacgtctctctctcctaagcctaagaatgtcttggctttttttgcctctatttgtcagaatgctaagaaaataaataaattaaatataagttaatttttttwaaaacctacttttcccaataatgaatactttgcagtgaaaaataattctacctgaaaagagaaatagaattgtgaaatatgttgatcattgtcatcaatttagtagaactggaatgtccccagattctccartcctatcggcatgtcatacttaactcttaaasatccagagtaaatgatggagttctcatttcaagtaayttgggtaatccatcccctcatcatcactcctttactcctgagggttcctgggggtcagacttaaatgttcctggtgattgccatccrctgtgtgctccaagttcaacttttgatttcttctccccaaatcttgcatgtgctgcagccgccctttctcatcttgtttcacattgccttaaacatggacatagtcctacctccttccttctccaaaacaccattcttgcttttgacagattttgggacctgtgggggagaaagaggaacaaagaacagaatttagcattaaggtcccaccgtgactctttttctcacctttctcttgctcaatctggacacacttccgttgaacctgctctcataacttctctcagtcttccctcatatcctcttagttcagtgctaagatgccacctcctcattttctattgcaaccctcttttttaacttttattttaagttcaggggtacatctgaaggtttgtcacataggtaaacgtgtccggggggttgttaaacagattatttcatcacccaggtattaaacccactacccaataataatcttttctgctcctctttctccccccaccctccatcctcaagtagacctcaatgtctgytgtttccttctttgtgttcatcagttctcatcatttagctcccacttataattgagaacatgcggtatttggttttctgtttctgcattagttttttaggccaatagcttctggctccatccatgtccccagaaaagacatgatctctttattttttatggctgcatagtattccatagtgtatatgtatyacattttctttaaccactctgtcactgaagggtttttaggttgattccaygtctttgctattgtgaataatcctgcaatgaacatttatgtgcatgtgtctttatgacagaatgattaatattcctctgggtatatacccagtaataggtttccaaacyatactataggrgggtacaataaccaaacagcatggtactggtacaaaaacaagcacatagaccaatgaaacagaatagagagaccagaaataaggccgcacacctaygaccatctgatctttgacaaagctgacaaaaacaagcaatggggaaaagacttcctattcaataaatggtggtgggataackggctagccatatgcagaagactgaagccagtctccttccttatactatatacaaaaatcaactcaatgtggcttaaagactacctaaaactataaaaacctggaagacaacctaggcaataccatcctgcacataggaacaggcaaagattctgtgacaaagacactaaaatcaataaaaacattggcaaatggcatctcattaaacttaagagcttctgtacagcaaaagaaactatcaatagaataaacagacaacctacggaatggtagaaaatatttgcatagtatgcatttgacaaaggtctaatatccatcatctataaggaacttaaatttacaagagagaaacaaccccattaaaacgtgggcaaaggacatgaataaacaattctcaaaagaagacagagatgtggccaagaagcatttgaaaaaaagctcaacatcactgatcattagtgaaatgaaaatcaaaaccacaatgagataccatctcataccagtcagaatgactatttattaaaaagacaaaaaataacagatgctgatgaggttgtgsagtaaaaggaacacatacattgttggtgagaatgtaaagtagttcaaccactgtggaaagcagtatggcaatttcttagagagctaaaagcagawctaccagttgacccagcaaccytcttatagagtagtttaaatcccttttgttctatttctatcamctagataaacctgtgcacacatgaacttgtcttaacaacaacacatttccctgagataaattgttttgcccccctcagtgtatgrtgagggtgatggtagtttcctattttaaaaaaatagcaatagttgctttgttgtattaacatacccaatagaaatatattggtcagcttttggaaaaatagatcaagtctagtttccaacattggaaacaaatttgatcacaagaaatttccaatcagacattttcatattgatgtcagtgaacacacataggaatgatccacaaaattactactcattgttttctttcaatgatgtagcttcaaatccctatctgctagactagtcagtggaaagaaaacaagtttgagaaacctcatcagccgaggtgttccatctacatccctccttacccctgtttaggaaccattgcctagcttgccttctccaccagagctataattctttaaaccccatttttcatttactcaacagattgaaacatttcctaaagttgaatatkgacccagaacttggaatgtctataccacattggtttacactaagttctgtttttattaagattctttgggtcactttcttaatggaatttgcttcataattacctaaaagggaagatgcttctgtgtatgttcatttgtttcagggtaatattgtcatccatagctgctctccaatgcacaaaactgagtactcatggtatatagggaggcatatagggacattcatctctgttcctacatctttgtaaagactttggcacagagacaatacttagtaaatatgttttaattgaactgaataattgtttattatttctgccttatgatatcagaactacaataagctctgaatatacatccaaaaaaagagaatatatttcagctaaaactgacttgacgaaatcagagaacacaggaagttctggatatttgcagatgaagtttaataaataggaataaaaggctcaataaaaaagacacacgrarrcacrcacacacacacacacacacacacacacacacacascaaatggaagcagccagacaaaagcaataaagaacaaacaactamaactatttgtgtatttttagggaaagaaaaagaaattgaaatcagaattaaatgacaacatttactggtcagcttatggaaatatatgttgcttgatggaaatcaacctttcctctgtgtttctaaatatccattacagaattaccctaactcaagagactgtcatttagtgataactagtagaagttcctgataatggagatgaaagaaatttgatttggggataaaaaagaagagatataagaacaagagagttggatttctttaaaaaatgtggagtatcccacactaaaayggtatcaaagaaaagtttttttctgcaaatgtgatagccaagcatcaattgggagggttgctgtttaaaaggcagcctgtctggttaagggagatgagccmgaaggagatcactgaagctttctgtctgtcctctccttacctgagtaaggaaggaggaaaatcattgtgtgttatttttagtgcagtgagaaaaagaaaatctggcttayatcatgttgaaaacaaaagtaacaccatatgttgtgcccaccgagagccattatgataatgcattagtcgggaagtgcataattgctcagctcagaaatggcaccgagtcacagcactgacaccagcaaattttttgcaattagtgtttggttcttttttctctgccaggttaaaaataataataatgatgataacagagcctctcttcaaccactgaaatgctgattttcttgtaatgtcttgtttgccggcaaactcttatttaggaagacaatccactgtctttggaataaaagatttttaaataaatactcacaaccctcatttattttcattgaacagaggttttattctttctgcttcattccaattccaccttctcctasagcatatcctgcagttacctctccctcttctgaaatataagtagaacatcaattatcctaggctatttattatttagcctattatttgtcttggttcatctcttgagwtaaattagatctgggaactttagcttaatccatgcrtgagcgccaagggtctttgagcattctataatcttatgcagaactgtgtgggtatgtattgtttgtgtatttttctggagagtcagttactctcactagatcataaaggggacttgggaaccaaaagtatctcaagacatttaatcctagaagcacaaagaaagtataagttgtctcttatattgcttttrccaaatccagtttaacacttcagtaacgttaactattgtgtcatggttctaagggtctttactttattaactcagtgaatccttgtagcagtctataaatggattatattatcacccctgttttacagatgataaaactgagacacaggttcataaagttggtaagaaggaaagccaggcttcatactcaggcagttgggttttagagaccatgctctttattactgccctgtactgactgtgtatgtaatatgcatgtattagaaggcccataaatagaaactcattattattattatagatttctgaatagcaggcttgcttttttagtctcaagaatgyaatcagtggaaatacactagcaaactaattcatgtattttataagcacttattacacatctttcatgtgcgtaccattacgcaataattcacttaaattatctcatgtaatgcttgtagttgcattcaaggtaagtttgataatccccattttacagatgaggaaatttaagttctgagaggctagataacaagcctcatctcattcataragcatcagaagaagagttcagctcatgtctgtctccctcagataaggtattccgtagcttctctgcagggytagaatttcagtttagtactacaaacattgctaaaaggtcttctaaacttggggacaagatttatagaaayccacctagttattgtcagtccaaggcagcatctttttttatatagagatgagagtaaaaaatcattgatttgagtaaatcaccatttactgtgctctttctttccattttaattttcactgtyaaagattcttgtctgaattccagactaacaactaccttcctcatatcaccacctgaatgtccagtaggtatctcaaatttatattcctgaaaccagaggcctgatgatacaaaactgctcgtcttcattcttctctccaacaatggcaattctgtcttctcaggcgccctcacagaaattactggggtcatcactgattctttctttttacccatrwcctacatccaaattgttggcgagccctgttggatctcggagtataacacataaaaactcccaccacttctcttcacctcccagctcactggtctgtgggacccacccccacctatcccccaggtgattacagtagccttctcgctgttctccccacctctgcccttatgcgccagtactctcttcccatcggtgaggccagggtgaccttattaaatgtatattgagtcattctaatgtgctgttccatacagaaaccatgttttagtagtgaagttgaaactgaaattaatttaaatgaatgaaacttaaaattcaggtcttcagtaacacttgaaactcaagtcctaagccacctttcaagtgctccatagcaacaagtggtgagtgacaatcctgctggacaatgcagatatcgaacgtgtccattggttcagaaaattctatcagacagcattacagtggtttcccattgggccccaagtgatctgggcccttcatccactccccacccctaatctctccaacctcatctcttttccctctgccctcactcattcagcyccaatttcactggcttcctggctagttctttaatgggccaagtatcatcctgtattcaggtcctttgcagctgctcatctctctcctggagtcatcttccccctgatatctccatgtcttgctgtcrggtctctgctcaaatgtcaggttattagacagactctgcgaccaccctagttaaaacagcagcccatcaaagtctttaaccctcttagcatttactcagattactttttcatttagcatttatcaccatatatttacttatttttctctctcctcctgtactccttgaaatatgagctgcacaaaggacaagattattattttgttctattctaagcatctagtgtactttctggcagactgcaaatgaaagaaagaataaatgaaagcatgacttgtgttttattgcacaggaagcagtggctgggacaagctgtggaaaaagtacggatcacgctttccccaggatgacctctgccagtatatcacatcagatgacctcactcagatgctggacaacctagggcttaagtatgagtgctatgaccttttgtccaccatggatatatctgactgctttattgatggtaatgaaaatggagacctgctttgggattttttgactgaaacctgcaactttaatgccacagcaccacctgatctcagagcagagcttgggaaagatctacaagagcctgaatttagtgctaagaaagaggggaaggttctttttaataatactctgagtttcatagtgattgaggcataactatcaatcacaaaagtatattcaaaaattatattttgaacaactcgaatcactcatttrtttccatattaaaatcacaaactcatccattaatgtagataaagcactgtttggatatgagatgtagcaaattccaatacattattggacttccatttggaatcatatgggatactgctggtcttatcctgtccctcctccaggtagagagaccacawgcaggctcaacataacataagctagaaaaattagatgactgaatttctatggcatattgataataaaattcattccatttgctgattgtctgaaattttctagaatactaataaaatacatactatagattctttattagtgaagtatgcactaatcaatactttgaacacaaagcctgtgttactgatttggccgttttgtgaagaaacatttatctttgtacgttcttctattgtgctttctatctaatttttattaatttgtaagagtaagcacctttagaatattaaaaattaattctttatcacatgttgtcatttcttcccattgtgttttctcttgtaattttatctgtgaattaatagctttttgtttgtctttttgatatactgaagttttctattatattcagccagatttttttttaagtctcggcttctgatacattttaaaagaccttctaaaaccaaggttttagaatactaacattttatcaaaataatattatagttttgctttttttaaaaaatgaaatctttactatgtttgaaatttagataagtataaacagtgagaacaaactgtttcccctcaaaataatagccagatgtataaacaaaatttattgaagaacaaagaaacacaaaactaaacctgttctagcttaaaatgcagcttttaccagatttctaggaattgggtaaatgcaaggttctagaaaaccttcaatgcattttgatactttatagtttcttatgtcactctcaagaactcytataagaccaagagtcatctttggactgtaggatttcaggggggttttgaaaacaaatttgatgtttcttatttttaataataacgctctgttatttttgacataaacagtacatttaataattaataaataaatattttaagtatgtaaataattagtactccctgtcacaaacaaaacaaaagtaaggttttactaaacagctcatgagccctcattctgccagtgaggaagccttcaaccccgtgtgatactcactctttcatgcaatagggcttccatgtaatgttgccgtataatcactttaaaaagttaaacgacccatctcaatcacctagtttatccccagggaatacactggcatagagagcctatttacactaataaactaccaagctttgttgttcataataagtaaaatggacttgcattgctctcttttttggacaacttcatcaatgctttttgaattatatgtttcaacaaatgaaacgacagttatccaatcagattcctgaaaatgaacactgaaccgttaatcatactgatatgtactactgacaaaggaaatctgtgaggcacacatgattgatgggtatggggccatgaagaccttgaagagcttcaccagaagtatggaaatcaagactttacagagtcttttgtataaagcacacgtgcaaaaacaaacaaaattagaactaacaatgctattgaaagatacaaaagaattgcagtccatagattggtgtttgtaaatatggcctttttctcgtccttattaaacccttagtatacaaggataaataaattctcacctgcttaattttagtgcaattgaaacacataagcctttttaaagagagaaattcccatgaaaacctactagtcagcaatgggaagttgtataaattcaagggataaacctatccctgttttcttcctgcactgtatgataataccaaaatttgggacagtcacatactaacttttcagatttgttcttgtgtttcagaaaaaagtgctcagcatgaatttggaatgttgttttatgtattgttgtggatctctcagtgtttaacatggtgccttgcatatggtaaatgctaagtaaagcgggatcaatgaattatttccttctcaaacatttatcttataccttgtgtgttcatattattattataaacagagctcaagaaacccaataaagttatgtgttgccagtgtaaaccttaacttatttaggactctttcagacacttttttgcatgtattgttggggcatattgccaaaacccaaagagaaagcatgatgtggagcacagcattttagggcttgatatttgcttattataaaaattggtgacttttttatggcyctgccattctgggccataaaagttaagtaatttctaatgcacaaccataaaaagagatgcaagggccataggagaatactagatcttaagtctgtggaactgcacagacccaaatgtatatttaatgtattttaaatgtttgtttaatgagaatagctggcacataatactttattattgaaatcatatttatatgtcacctcatcagaatgttacttctaaaaaaatgtgggcttcttgcgaagtcccacagtggagtgagtggattaaaataaccttgttaaataaagctgtagagccagacttactgggtacaaattccggttgtattaattactcaccaagtgacattaggtaacttattttctctctattctcatatttcttcatctacacaatgaagtgaatcatagtatctacctcagaagatggttacgagaagcccaggagttaagcttcataaatatgcacataaagtattagactcatcaggaatactcaaaaatattaaccaccattgttattagttactcatggaaactcaatacaaaatgcagagtaaataaaaagtttaaggaaaattacaactaaggccagagagctagtacttgtaggagccgacctagtttctgaccttgtgattcttagccacaggaagatggcctctgtgtctttcagagctaagctggtcctccaagagactcaaggtgccatcaggattccaccatccaagccccaccttaagggatctgcctccctgagctatccatgctctaagtgcctgtgctcagtactatgtgaaatggccccatctcaatcctgcctgatgagactatccagctggcacatggatagaaacctataggcagaaattgatgaaacagtctttctgaaaattatgaaatgcatccatcaaaaattctcttaaaaatgtgaaattacaaatctggggcaatgagacattcattcacttattcgtgatatgtacaattaatcaatatttattgagtacctctttggtgtgagggagttttctaagcaaaggacatatcacagcaaaacaataacaacaacaacaacaacgaagttccagacctcagtgacctgatttctagtgggtgaaataggcaaaaaataaatatatgccagagaatgataggtggtattaagaaaataaaagtaaataaggggaaaagagtaccagatggggaaatattaagtggagtgatcagggaagctctctttgaaagaacaagatttgaacagagattgaaatgcagtgaaggagcaaaccatgcatagagttgggagaaaagcatttgaagaagtacaaatacaaaggccctgatgtggaaataagctttacatatctaaaggacaataagaaggcgaggtggctttctatagtagctgagctgaaaggtcctaagatagattcaagtctagagttgccactgtgggccacatgtgggaggacctcactgggatgccatggtttgaaggtgaggcatggaaccaacttgcagagagaatgagagatgccaggagtctaagaccacatggcctttgaatgggagatgagctttggctgtctcaaggaagggttcttgcagtttctattcccatctgtgtctaacctgaacaaataccattttactccaggtatccttgtgggtgtctgcttcttgcctcccaaatgtcttaggtagagcaaaatagaagatcttatttggttgttacctcatgaattagaaagattatttattattatcctatttcataggtgaggaaactgagatactaatacactgaataatttaacccagctcccaaagcaagttgataacaggaagttagccaaaccctatacctgcccggccgactcacactgtatgtctgcatattgggcaagttaaatatgtgatcttcattcatcttagatgcggagtatgacttcatagaactaaatcacctttgcccccaaatatccacttgtacattgaaggggacctgattataaaagggaagaagaagcaatcagaggatcagagtactatgaaaaaatcacctccttgaataatgagatagtactctttctaaatactacacttcagtaacaagttcattttaagcttgtcataaatatctgatttttccatcccattgccttaacttttgcctgtatttctctgcctcacctcctaccaggtcccagacatcaccaatttcatgtttaaattatctgtcattcataccctagctcccctatgattcataaactgtgcaatacacatccatagtacatgatcaactaatgcaggatagttaaagctaaggatcatgtaatccatttctcagtgtgatatacaccataaaaaggcaactgcagtaaaaggggggttgatttaagggctccctgggtaacgacagtcacaatttctaaatgtgccaaaaattaattagggctctgagtcagattgtagtaatctctgtggcaatggattaataaatacagcaagacgccgttctggaggctgcactgacacatggggatactctgtataagcagtgcctttccatgatcatattcttctcttgaagaattatctgtgtttcctggcttgtcttaatgatacttgaaggactttgcaaacaacctgcttaggatagaaaatgttgaaataaatcacaggggccatgaggtatagtccaaccttggtgagttctccaaagacatttgctatagaagatgcagaaaagtgtcagtacctttatttatgttctacagctaactaatttcatgctaatttcatttctatactgtgattcctttttctgcatgtgttgatatatgggtttcatgagttaattctctggttttcaatgcaggcagactggacataaatcccagggttttgtagaagaggcagttgctccatgctgcttattatcagcaggagcacattgcagccttagcttatttatcaagatattgctgcctcatgccacacatttcccaacagacttcatctaccccacaatagcctttaatggaaggtgcattaccctccttgtggtttgtttataattacttttatttctccaggactgattgggagaggagtttggacttattcttcattgtataagttacccaggcaaggaaattagccagggcttactgctccagtagaagcctcatgggatggatatgtttgggcaaggttggcaacttatgagtttcccatctgtgtgtcctaggaatggtggagcaaaaactggctcttcagcttggctgcttccctctgttttctttggccattctaattcatagtttccagcttgaaaaagagttaatcatggaggaagattctttgctaaataaaacagaccataagggatttaaaagaccccattttaataatagttaacatttcttgagggcttattacgtgttgtgctcatgttaagtgtttataggcattatacaacctaatcctcataacaagcttatgagtgagttagttacaatttctattccaatttcacaaagaaggaaactgaggtttaaattatatattaaattatataatgtgtacctcattcttacatctggtggagccagaattctaatacacacgaattaaccccagggaccatgttcataaccactacatcttgctgtctttaataatgttgaccttcattgcctctctgtcccttttcttcctctttaagtttcatataggaattatctcctagcttcttaatttttatcctatttcccagggacggatctcacctggtgactctagcataaagatagtacctgtttgacttgatcaactttggcccaaaatatattatcttcaagaggcaaaatatattatcttcaagaggcaaaatacattatcttcaagaggctactcctgtatgattgtggcttggtctcttgggcaagagagaacaatcccagtaaactgatccattattttgaccttgtataaacatatcctcagttactgagcatctgataacaaaagcctttttaacagcaatattgagcccagtgtggctccagctggacagagtcattaggtgaggtggcagagactagccccctctgccttccttctatggtaatagagtgtcaaatttttaactaggtacaagcctgcccagataagactacatttcttatacgcccttggagtttgatatagccacatgactaagttctaggcaatagaatgtgagaagaaataacacaatttgtggaacatgatgacaaagaaagagatatattctcctcttctactttttttccttctggatggctggaatgtggtagtcagctatgccagaccatgcagacaaggacagcaacaccctaggaaatgtggagaaacaaggtaaaaggagccacatccctggacctgatggagcagagttgccattttggggtggactacctaccctctgagtgtcacctgagagagaaagggcattctaccttgtacatacaatgttaacttttttagagtaatagcaactgaaaccatgcccaaactaccataggtagcttaatttgacccacatatttcccatctgtttcagaatctttttttttaatctgcaaaggaagccacaagaaatattatgaaaatggtaaaaaaaaaaaaaaaaaccttggaaaatataacataagttatattgagggtaggaaagtggatgactgcattggaagaaaaacattttttcaaatggggccaaaataccaagatgagaagtgcactcatcttatcagtcacctgagtcctagatatttaatctgcattatgtcaaatacccaaaagatgagcagatgacttagtcattcatcatggtatttagttagatttcaataaaacataaaaatatgaacattaacagattctatgaatggtgcccatgcactgcttttaaaatttctgtggactgaagaatgacctgggtggctttt

SEQ ID NO: 94305 - DNA, 63505 bp, Homo sapiens
  misc_feature (1)...(63505): n = A,T,C or G
aataataataataaactcattcagagataagtttaaacgtgtcatatgtaaaagtcaagggtaagtgatttatgtgtgtgggaggggctgcacaggttcttcctgaaagaggagggaattttataggaacatacctggtggggaggaggcagtggcagtttttgagagagagtcagaatggagtgggggtgactctgggaaggggccagcctggacctggttgggctgcatggagaaactttattccctgagcacagatgctgcatccccagagagataactgctgcccaggagtggaactagccatccctccagcttccctggtggcaggcagcctctgtcgggttagagagaggggccctggctgcatctccctggagagccttccccaggacacacaggcccttagctctgatggaaggtttgtcagtactgggcaaaagtgagtggtgcggaagttagaatccttggctcttcacagggtggatgatgatggggctttgctggaagctcctgtcttgggctgttacaaggagagaggtgggtttagaactggatactctacataaacagaaaatgcatttgaaaaaaatagtagccgggcacggtggctcacgcatgtaatcctagcactttgggaggctgaggcgggcggatcacgaggtcaggagattgagaccatcctggctaacatggtgaaaccccatctctactaaaaataaaaaaaaaaatcagccgggtgtggtggcacgtgcctgtagtctcagctacttgggagggcgagacaggagaatcacttgaacccaggaggcggaggttgcagtgagccgagatcacgccactgcactctagcttgggtgacagagcgagactcagtctcaaaaaataaataaataaaaaataaataaataaaaagaaaaaaatagtagaactgggccgggcgtggtggctcacacctgtaatcccagcacattgggatgccgaggcaggcggatcatgaggtctggagttaaagaccagcctggccaacatggcgaaacctcatttctactcaaaatagaaaaattagctgggcatggtggcgggcacctgtaatcccagctactcaggaggctgaggcaggagaatcgtttgaacctgggaggtggaggttgaagtgagcccagatcacaccattgcactccagcctgggtgacagggtgagactccctctcaaaacaaacaaacaaacaaacaaaaaaatagtagaactggacacttaggtagacccttctccaggctgcatctcctccctcctctccctgcccttcccctacaattgctttctttcattcacatattataagagcctttttttagtcatgtttacagtgaatgcttaatatgtgtccagtcccatgctaggcactggagatgccaaaatgaacaaggcactctcctaggccttgggttgcttacagtcagataaaggagatccactggataggatctttccctcttactcacctgcagcaggttgcagggtacaggcccaaggacttggagtctgaagatcattaggttagttgatcataggcaaaatgatgaaaacacttagttagctcaagtggctgctgtgagtagtatgcctttcacatagtaggtgctcaataaatattaactaaaattggtccaaatctaggaggaagtccttagccagttttaggcttctggaacccaggtggaatgcccaaacctgggcttggagatggtgcctataaccctctgtattctgatagggacctgtcctctagtccagtctagaagaggagggaggtgattcaaatgggaaaatcaaaagagtttagagcttttattttattttttattttttgtagagatgggggttttgccatgttagccagactggttttgaactcctgagctcaggcagtccacccgccttggcctcccaaagtgttgggattacaggcgtgagccactgcacccagcctggtttagagcttttaagttagaaaatagaatgatgagaagatgggttctagattgattaattcaaggcagatgaacctctgtgggtgcatggtggggtaatgagagagtcttacttgaggaggctgggcgttgggggcagaaacttggtatgagaccactgagtgaactggaaaacctcagtggctggctcatgggccctctggccagcacctcttccccctcactctctggacagttattttttgttgttcctgcccaggaatagtcaaacttaggcctagcaacacctaaatggaggacaatcattcagcaaacatttattgagtacttactgtgtaaccagtccctatttaaactgctagaaatacagcaatgaagaaaatagacaaagatccctatcttcgtcatgcacatacgcaagtatatctgaaggataaattattagaagtggaattactggaccaaagggcaagtgaatttaaaatgtttactgatattaccaaattgaccttcaaagagtttattatattttatgtcccgcctggatgaccatttccccaggagtgtatttgtctttctttttttttttctcatacagggtctcactctgtcacccaggctgatgttcagtggtgcagtcacggctgactgcatcttttttttttttttttttttttgtctcgctctgtcacccagcctggagtgcagtggcgtgatctcggctcactgcaacctccgcctcctgggttcaaacgattctcctgcctcagcctcctgagtagctgggactacaggcacgtgccaccatgcccggctattttttttgtatttttagtagagcttgggtttcactttgttagccaggatagtctcaatctcctgaccttgtgatccgcccgcctcggcctccccaagtgttgggattataggcgtgagccactgcacccagccagcctcccgagtaactgggattacaggcatgtgccaccacatccagctaattttttgtatttttagtagagatgggttttgccatgttggccaggctggtctcgaactcctggcctcaagtgatccgcctgcctcagcctcccaaagtgctgggattacaggctcgagccaccgtgcccacccagctcactgcgtctttgacctcctgggctcaagtgattctcccacctctgcctcctgagtagcttggactacaggtgtgtgccaccatgcctagctaattttttttttttgagacagtgactcactatgttgcccaggctggttttgaactcctggacgcaagtgattttcccaccttggcctaccaaagtgctcggattataggcgtgagccagcatgcccagctgcccagctaattttttattttttgtagtgacatagactcactgtattgccaaggctgggttggaactcctgggctcaagccctccttggcctctcaaagtgatgggattacaggcctgagcctatgcacctggcctcccaggagtatttccttccttccttctttcttttcttttcttttttttcttttttgttttttttttttttttctgagacagggtcacaccctgtcgcccaggctggagtgcacaatctcagctcactgcagccttgatctcctggactcaagtgatccttccacctcggtctcccaagtagctgggactacaggtgtgcaccaccatgccctgctaatttttgtttatttttttgttttgttttgttttgttttgagacggagtctcactctgtggcccaggctggagtgcaatggcacgatctctgctcactgcaacctctgcctcctgggttcaagcaattctcctgcctcagcctcccaggtagctgagattacaggcacccgatacagtgcccagctaaatttttttttttttttgctttgagatggagttttggtcttgttgcccccgctagagtgcactggtgcgatctcggctcactgcaacctccgcctcctgggttcaagcgattctcctgcctccgcctcctgggttcaagcgattctcctgcctccgcctcctgggttcaagcgattctcctgactcagcctcctgagtagctgggattacaggcacctgccaccacgcccagctaattttttgtatttttagtagaaacagggtttcacctgttggccaggctggtctggaacgcttgacctcgaactcaggtgatctacccacctaggcctcccaaattgctgggattacaggcatgtgaatcaccacgcccagtctttttattttttgtagagatttgatggtggtggtgggggctcttaccatgttacccaggctgtacttgaacttctgggctctagcaatctgcctgacttggccttccaaaattctgggattacaggcatgagacagcatgccttgcctggagtgtatctttttttttttttttttttttttgagatagaatccttctctgtcacccaggttggagtgcagtggtgcaatctcacctcactgcaacctccacctcccgggtttaagcgattctcatgcctcaacctcaagagtagctgggatttataggcgtgtgccaccatgcctggctaatttttgtattttttgtagagatggggttttgccttgttggtcttgaactcctgacctcaagtgatcccccaccttggccttccaaagtgctgggattacaggtgtgagccaccaagactggccacccccattttaggacaagagaagagaggtgataaggaactgctatttcaaaaagatgaatgggagggaagggaccagaaagtgacatcatcagggaacacttgattcaggcatgggtagcaagttcagttaccttactcctggcagcaacaggattgggggagggggtcttggagaagattttgtctgcaaatgtcgcaacactgttgcagtgtgagtatgacccaaagtgcttggcagggggacaggcctgctgcttccctgcattctgggctgacctcttcacctgagtcggtcagtggacgcttttggcctccttcctggagctagacagctgttaggcttagggagcagctccggacctacagggttggggtgcaggtagggagggaggctgcagcatgtcagagtggtaaatacatgtcctgatttccaggactgatttcacatattctgccccacaagttcaccagcacctgtcagattggatgtcccagtttttggtttggaaaattcgatctgtctcaggtaatggagaagggggagacagcagttcattcattccagtgtctaagcctgtggttggtgggaacaagagactgtctgggatggctccagcccttcgctggaatctcgcattgaattcctagctccgccctgatccgtgctgaggcgagcaggtgagtgggacggacagcgctgtgcctgcaccctcctagccccacttgcttaccgcggcccctgccttatcccacactgggaagtatgctctgttagcctcggctcagccttgcctcatcggcccagtggggagagtccagggaggagagaggctccacgtgctaaaggaaagcggcctgccagacactgctgcttaaggagactgtctaagcaatcggattcggtgcggccgagatgcagacgtccgtttctcccaagggaaggagcaagggtactccaggtcccaaagctgcgttacagccagttgggctaatcccacccgcccctcccccaactccccgagtggcaatctgtccagcccctcaagcgatcaggccacaacccccagcaccgcgcgttctcctcccagcctagcccggcccatctccccacccggggccccgccccggccccgcaggctcccaagaggcggtggacgggccagcgggactacaagtcccagcaggccccggggcccgccctcgtggggcggagccaagccagcagcgaattgggaggagccctggcgctcaggctagggaacgcgtgtggccaatcgcggggccgttctcgccgcgagccgatgggggcggggaaaagtccggctgggccgggacaaaagccggatcccgggaagctaccggctgctggggtgctccggattttgcggggttcgtcgggcctgtggaagaagcgccgcgcacggacttcggcagaggtgagcacgggaggctgttttcgctggctggagcccgctcgccctaggagcttcctgcctccgtcccccaacccggaaccgccttccccgacgcgggctcggtgcccacgcgccctgctcggaagttttgagggtcttagctttaggttagccttcgcccggggtcccggccggtggccgcgtgtcgacgcccctcccctccccccgcgcgacacacacatattccagttcctgggagtttgcatggggcttgccgccatccttgcctcttctgcctctgccacattgcatggtccccctcctggcgcgcctcacccctcccgggcacagctatcgaggctcctcgggctcatcgggacgccttttggctccatccgggttcccccatcggatgccgggacgggaagtagagaaagcggtggcgactggtcccactccgattcctcactggccgggctcaggcccttcttggttccgtgggtacaaaattgagctccacgcccaagtggagagaatgagctatgcgcgcctccggggcgggccacgcggggccaggctgccccagggtgcccgaggcctcgcctcgtctcgccgcgaggactggaatctcgcagcaaggaccctcctcgcactggaggtatcgtcgagtccagcccctaagcgacagatggccggggtgccaccccacccttgagctgacgccaagtctggccggggaaaggtcctcaaggggctggaggatgctgccgccgccctcctgtcgagcctggcaatgggccagtcccagcgcctgccgcggtctccaaccttggcagataccgtgcagtgccgagttctgccgttatggggtccctggaggtcttcctgggaagaggattttggaagagatgataaggaaaagtgcacagcacagtttggccagctagcctactcctctccacccttaactttcctctgtgttttcagctggctcagctgaactaaaatgtggggtgagggacagctggtaggtctcatttgcccagatgggtgattttcacctcttagaaaccttcctaaacagcttggggggcggtagtgggaagacccctcagacactggacagcttatggctccatccccgttctgacactatgcctgccgcagtaaggggcactcacagaattctgcctctctagaatttactccagggattgcctgtcttctcaaaaaataaataaataaatacctacatacgtaagtcccaatcctgcagatactaaccttcaaatgagtgtttttgtctttcccagaggcacccttagtagcatccccagtgattcccttcccctggctgtgtcccaggggcgtgttctggggaacaggcttctttcattcagcctcctgtgtgggctgcttctctcagtgtctgctaaaagtgaactcaatcctgggtcactcacccgtctgcagaaagactccattcagctcataaggcccctcccttagagaatgtgtgtatgtgtgtgttttcaggttccttggcatgatttcccccaaatggtttacacatttagctgttaccaagtaacagttcctggagtccaagctcagcccaatcatctgttacttgtttgacagcacattcagctactggggaggcagactaagacgttctggggagcggtcccaaacccagataggtatttgtaggtatttgctgattccactagagcaaatattcttttttttttttttttttttttgagacagagtcttgctctgtcggcaggctggagtgcagtggtggatctcggttcactgcaacctccgcctcctgggttctagcgattctcctgcctcagcctccccagtarctacaggtgtgcaccaccacgcccggctaatttttgtatttttagtagaaacagggtttcaccatattggccaggctggtctcaaactcctgacctcgtgatttgccctccttggcctcccgaagtgctgggattacaggcgcaagccaccgtgcctggccgcaaatgttcttaactggtggtcagtctgtgggccatcggatcattgtcacaggtgagcaccttgaaacaatatgcacrattggatttgtgtacctttttctggggtttttttcagtctcagaagagtctgaggcctcaaagaggttaagagccactgccttagagagactttaagacctcactgaaggccgggcgtggtggctcatgcctgtaaatcccagcactttgggaggctgaggtgggtggatcacgaggtcaggagttcgagaccagcctgaccaacatggtgaaaccccgcctctactaaaaatacaaaaaaaattagatgggcgtggtggcgtgcatctgtaatcccagctactcaggaggctgcggcaggagaatcacttgaacctgggaggctgaggttgcagtgagccgagatcactccactgcacgccagcctgggcgacagagccagagtccttctcaaaaaaaaaaaaacaaaacaaaacaaaaaaacagaagacctcactgaaccactaaagttgcgatttatctctactgagtccactccctgggtttgtgagccatttgccttctctttattggtgaatttgcagaggccttatttttattatgttgtatacattccttgtctcaacctcccgtctctaagccagaatgctctagtggcaaatctcttgttttctatcctgtattatcccattgtgtcttctctcctatccsccttccaaagaccctatggagatgggctcttggacctgaaatttgatctgggtctcaagaaaactgtgatttctcagctgcaggggtccattttttctcccttgtcctttccaaagttgggtcttgtgtctgttttggaggtgccaggttcaggggactgttttactgggagtctcagacttctttcttctagagaggcatagcccagggacttcctttcccctggagttatggaaggagtctgaattgctgaggatggtcagccactgccccctcctctctgagtgttccttgatctgccctgggctgcactctctttggaagggggtgggggctgtacccattcaatctgaggaccagtttttctggtctgagtcaaaaatattgggaaatggagcagtgggtggggggtggaggaccgtggggcagtgaggtggttgggacgtctctggaaactcatactgagaaggaatctcaagtcattccaggggaaggccagaaaagggaacatctctgagccccttcccagctaccccactttaggcagacaccaggctgaatacacccattgtgccatgctggatactagctaggaggccgacagaggcagccaagccaggatgagaacctgaagccccaccagcctggccgattgggagggggcgcaatgtagcccctggaatgttggccttctctgagttgggaacggagacccaacttccagcacgtgtaaacaagccggctccttcactctgccctcctttatttgtacttgacttttttctcccccagcaaattaaacagctttgcttctgggctttgggggagtcaggagtgacttttcctgatccggccaagctcttggcctgaatttccatgcccacctcccccgattcccctccccagctcagtccttgagttacccacaggagaatgggtgtatcaggacagagtcttggagaggggagatgatgaaattcttatcatagactctttgaagtgaaaaggacacatgggcctggctcttggaaaaatggtcttttcttgggctggtgtggatttttctggggacctaggtgtaaragggtttgggttcgagtcttgggtcataaccttgcttattattaggtgggcttcttgggcaagttatcctaacgcctctgagattttattcctcatctaagaaatggggttataaatctcaktgtacctcccagagctcatatgagatgagtttcyttttatctttttttagacacaaggtcttgytctgacacccaggctacagtgcagcggtgcaatcatagctcactgtagcctcgaactccaagatgagttttcctatacatgtgatggaggatggtttctgcctcttcctcctcctcctctcagtccgccccagttagaagtgaccactacagggtggtccccagagaggcatctgttcttcttagtgagttttgctctaaattagcagctggatgacgcagtggggcgggtggaatgtgctaaaggtcggtttccctgccctgtgtctgctccatactcaggattgggaggctagtgtmcrggagaaaagaggagaaaagagcttagcgatgatcctcccccctcccctactccccttctaaccaggacctgggggtgtgaccctttttgaggctaagtaaacttgctggcttggccattggcccggtggtgtgtaagggtgtgtataggggtaaatctgggtgtsggggagatgaaacctgtagggagagaaaggctagccttttgcaatttcagccgtactctgcactggtcagagaacagaaaggtgtttcagtgtctgcccacctcagatgggaccagcactcagatttgggtcaaagcaccggttttcttggccttctagccagctgccttttgctccaggatgagtgtggttgtggatcagctagtttgcctagagggaatggggcagggtaaggcaagagtcccaggggaaatggcacttttgtttttctctatcttccctcacccattatctctggatcttcttcctctgctggcaaaagtgctgcttgatatctctcttccatccctcccgctgggacagcattttttccttcctcttgagaaaagctgagatctggttttattgtctgggggcaactgggagtgggtctgccctgctggggaagatagtgcctccacacgcctgcccccttctgaccagcttctctctcccagacaggtagagcaggtctctctgcagccatgtcggccaaggcaatttcagagcagacgggcaaagaactcctttacaagttcatctgtaccacctcagccatccagaatcggttcaagtatgctcgggtcactcctgacacagactgggcccgcttgctgcaggaccacccctggctgctcagccaggtgagccctgcctccactttgggcctttcttccaggcccggggtctgaggaagagaaagccattggtttgttggtgatgccgatagggtcatggggttggaggctgccagcagcagctgtgggaagcatgccatgggctgagcagggtttgtgttcatgctgagccctgcatgttgaggtaccccagcatggtataccctgccatgggcttgaaactggacaaackggtgtccaaatcaaagctgtgtttattaaccatgtggcctggggcaagccatttcacctcttttgagttttagattccccatctctccaatgggataatactcactttgagctgtaaagattagcaagaagcatttagcgtgcttggtgcctggcacatggtagatgctcagtaaaaagtagggatgtgccctctcctcccctaagtggagtatatcaggaatgtatcaaggcaattaggaagtgtgatgttgtactttgtgaagaatggccccgaccctggagggtcagcctggaatagagggctctgttcttgagatctttgcagggccattgttagaaagctcttagatttccttggcagggctcagagagtaagcctaggactagtggtggtgtttcttcccactaggaggcagctcaaccacaaagggatggagggagtttcctggccctggagatgtatgagcagtggttaggggctgcttattgggcctgttgtagacagggttcaagcacagggatggggttgaccagatgacctctaaggttccttgctgcctcaaggctctgtctctctgttttcctctttggaacacatgttctggtccatattctgaggggcttactgttgaatgaagaagctaatgtatcacatagggagggtagagaatcacttattcactcagcaggtatttgctgagcgcctactctgtgccaggctccatctgggcacaaatgcctctagatacctggttgtcaaaagcaagatattggctagggtaggtggaggaagcatccaggagttgactctgaaggatggttagggctggctttggagcagagtgaatgggaagtcaatccctgctgtcctctatttggatccccaaaatactacggtttatctaattcttcctcactctaaatacaaaccgcttttgttccagaacttggtagtcaagccagaccagctgatcaaacgtcgtggaaaacttggtctcgttggggtcracctcactctggatggggtcaagtcctggctgaagccacggctgggacaggaagccacagtgagtgggcatggggtcaggatgaacgtgtgtggtaacagaagcaaatatggtcacctycaggtcagcagctctgtggatcacccccacagccagtctcattgtagctcagggaaggcaggagtcctgtggcgctgacccactcaggtggctgccagcagtaggctcagtcttgatgcccattcccagctccctcatcatccaaacttctttgttttattggtttgggcaagatgtgctgcagaggtaacctcaatataattcaagagccaggtggaaatggtctgattctttttttttttttttttgacagggtcttgctctgtagcccaggctggagtgcagtggcgtgatcttggctcactgcaacctccgcctcctgggttcaagcgattttctagccccagccttctgagtagctgagattacaggcatgcagcaccatacttggctaattttgtatttttagtagagacgaggtttctccatgttggccaggctggtctcgaactcctgacctcaggtaatctgcctgcctcggcttcccaaagtgctgggattataggcatgagccactgcgcccggcctactttatttttttttaagacagggtctcacactgtcactcaaggctgtagtgcagtggcatgttcacatctcactacagcctccacttcccaggttcaagttatcctcccacctcagcttcctgagtatccgggactataggtgcatgccaccatccaggctgctttttaacatttttttatagagttagggtcttgaatgttacccaggctggtctcgaacttctggcctcagggaatcctcctgcctcagcctcccatgtagctggaaccacagatgtgtgccaccaagcccaaattcaattattaacttctcccagcttggtgatgaatttcaaccacgtagatgagagagttaaagtgaaacatggtttaggaagggtaagagatgcctggaataaaattatgtttcttcttattccccaggggagctggaggactaagggagggagtggagctgaggcctggcctagcctgggaagaatgtgccatccacacctggctctgtagagcacgtggctctgaagggcctggtgctcatctggggtgaaactgtaccagggatgagctgttctcttccttggctgcctcgagaatagcaatgaaggtggtgatggagatgtcttcctccctcattgggcttcctcagagtagcccttaaatgttaatttcccagtttctggccctcatgggtaaagcgggatccttgaagttgcacatggacccaggcgtgaagcgacctgtcccttgagttcccaggcctttggagagaggatggtgggattggagggagggatgctgagcatgtccccagggagcacatcctgcttccttctgctggcctctgggaggggaaggtgggacatcagacatctgagctggcagcagcgttgggccagcaggagtggctcattacctcttatggattgctgtctggtccctgactcagcagtgacgcacaggccaggcgggggttttgggacttactaggatgagggctgtctcgccacagccgccgccagggaatcactcgaactgattagctctgcaggcctgtggtcctcagccaggagagtctgcgtggagaagtttccctgattaagccctggctccccacttctccacccattccctgcgcccggacccatgtcctgaggctragtcactgtgccttcctcaaggctcatgaagcagaatggttacctcccttctacccggtttcccctccccgtcaagctctgccacagccgtgacttgttggagccctttcacttgcgcaggtcctgtgtcaccctccagaggaggccaagagtgggcaaggtcggtgcctgttcaggcacagcccgcaccagagcaaggggtgaaagggcatctcctgaggacttactgagcttagggatctgtgaccccattttttctggaaaaatctctctttgctgggtgtggtggtgggagtgcttgggcaccacccctgtgcagtccctccttctgccctaggggcaagacgtgctgtccctctgagtttcatctccctcaatttttctgtaggttggcaaggccacaggcttcctcaagaactttctgatcgagcccttcgtcccccacagtcaggtatgtgtgaggcggctccaggctgggtcttctccctcctggaaccttgggtttgtccaccgtaacctgaggaaagaagtcaagctgatgaggacagtcagagggaccagggtccctgaagctgcactgaggatctgagggtgctgcggactcrggagtccagaggggaaggaaagggcttggtctacagcagagaggagttaggactggtaacaaaggggacttccaagtgcagggatgagaacgacctgcaggcaggccccacccctcagctggggttggtcatactgattcagtctggaccaccagccagtggggtagaggcttcttcctcttgtcctcggggaaaagatggtggacaagtctctggatgaatggttttcactgggttttagaaaatgagaccrtggggattggtttcctctcccagtacatggtagaccatcttccccagttcagcgcccctcaccagcttcgcccccacaaccccaatcccactgtcctgtctcttcacctgcaaggctgaggagttctatgtctgcatctatgccacccgagaaggggactacgtcctgttccaccacgaggggggtgtggacgtgggtgatgtggacgccaaggcccagaagctgcttgttggcgtggatgagaaactgaatcctgaggacatcaaaaaacacctgttggtccacgcccctgamgacaagaaagagttgagtgagagggacggtagggaggtggcagttcggatgagaagaccgacaggctctgggcacagactggggagagcagagcggtctcctctctgggagccaggtggtagacacggccctgtcctgaggaagacagctgggtgcagggcggggactggcttggaaccagactgaaatatgccgccagcatccctcacctccttgcccctgtctgtctgacacctctgcctccagcttctcgcctgacagctcctttccgcctcagtggctgaagakctatgtccagggagcaggggttgcagaggagatggaagggccagtggggtgcgtttagggaaatggagctgtcggtggcagtgagagattgctgcggggcgcctggggtgctgccgagctgctccctgatggatgaactgtccctctctccctcccacctctagaattctggccagttttatctccggcctcttcaatttctacgaggacttgtacttcacctacctcgagatcaatccccttggtaactgggtgtgcttggctgggagggggcaagggtcccagtgcctatgacagccctggccttggcattcagagaaccagactcccacttgccagagggtaacacaagacagatgtgcacaagcagaggggtccccatgcaggtttagtgccagttcctgtttctgagctctcagaagactgtagttcttctcttagtcaactccaacctctctctttggtcttagagacagagtcttgccctgtcgcccaggctggagtacagtggcacaatctcagctcactgcaatctccgcctcctggtctcaagcaatttttctgcctcagccttccgagtagctgggattacaggtgcccgccaccacgccaggctaattttttrtttttagtagagacggggtttcaccatgttggccaaggctggtctcgaactcctgacctcaggtaatctgtccacctcggcctctcaaagtgctgakattacaggcgtgagccaccacgcccggccagaagtcctggttttgatctgactgtgtgcttctgctcctcccgccaggtcaggctttctgacagcaggaggtgggcagcctctgcactgctctcaccctttggcccttcattcctcctggtacactcagaggcctcacacttgcctccctctgtgggagttggtcaatcattaacccttgatgctgggaagagcttggtctcagtctcttgggctgtgaaggaagcaggtggtgttgagggagagtggcgtgggctggctctggccaggacttctcagggcaragtctaggaaggcgagaaatcaaatcattccagctgaggatgcagcccctctaatggaccagatggccttgtgctaactcaatcagctaaatggccctgggggaggaggaagatgggtgtccagtgaggtggtataaacgaatcctgctgattgggagtccagtgcaccctgcggcccctgctccacctgacactgaggcttcccctagccagaccctgggagacatagatgtgcataccggtggggggtcttctgtcagcaacatgtacctttaaacactttttaaaagtggccggaccatgggtttgcgcatggttagatactcaaaagcagggagtgtagcgttttgtaaagatgtttgaaaattgccatggcaactaatacagacctccatgtcccattgcctataggtcagggagaggggaatggccttgtagaatttgttttgcctttaatggggaaaagctctgtctccataagggcctctctggtttcttactgagcttagagagttctgaggcctgaatgggccaccatgggatcggtgtttgtggaggggttggaggttggtggttgtctctacccagagccggtgtctgatgattgcctctgctccccttgaagtagtgaccaaagatggagtctatgtccttgacttggcggccaaggtggacgccactgccgactacatctgcaaagtgaagtggggtgacatcgagttccctccccccttcgggcgggaggcatatccagaggtaaggctggtttagagaggagatggggactsgggggagggcggtggggaggtgactcatctttgatgtgcatttggccccccttcatgagctgtttatttggcagggaaaggaagactgagaagcatttaattttcttaaaacctcaatggggtgggggtgggagtgagccaagcctctgaatcccagccagaaatccttttagatttctctctcaatcagcctccctcgactcttcacttgatttgttgcctctccatgattccaagtgtctcgccttaatcctgatggaaggtcattctctccgcgtctcactgagaattttaattgctctttcccactctgtcctctgagaagtcctcacagcaggactgggctttctgggaagtaccccaggcccagggaagaggctgggctaggagacggtctcgtctggggaggcctggggttggggggacgtgtgatgggccgagcaggcagatgctggggtgagggcatggttgagcagagggacatggttaggctcaggacttaggcagagggccaagtacttgacgtcagagaagggagatgggaagtttgtccctaggcagtgactgtgactatgggtgkttttggtacttggagacaccatcaagtgtcttcaaggcatgtggggccctgcgtagccccttcttcccaccccattaaggcaccttttcatgtgcttccagggaaagcggggaggggtcctaggatctgggacctggtaaagggggtaccccaagggcctacctgttgctgtctggtccccaggaagcctacattgcagacctcgatgccaaaagtggggcaagcctgaagctgaccttgctgaaccccaaagggaggatctggaccatggtggccgggggtggcgcctctgtcgtgtacaggtgaccgaagggggttgctgaagggatgccagcccagtctacccagcatcaacatgtgtgtrgcctgrgtgggtggggtcctgtcactttggtgtgggaatttggggcagaggaaagcagtggcatcccagagggcttcgagggatgttggtgagggcctgtcctgcacccagtgtcttctataaccttcttgtttgtgtcaaaatgaagctgttttatgagttttaattctgaaaattacgtgctccatacaaaggtacagaaaatgagctagaaagtgaaagttgcctggacatttccccatcctctccctgaccaggtcaccccagttagcaagttactgtatgtcctgtcaagcatatataaatatttatactctttgctttatagaatattaggatcatattctacaccctttacaataattagcagtttttttcactttaagcatggtagacacctgctcacttctagatgtgcaatctgccattcccttctgtgtgtgactggcactatttcctctggctgcagcacactttctcttgggtagcccgtcagggactcctgcagtgtgtgattttgcttgtctttgtgttagggaggtgctcattgttcattttacctgccattgtctgtccagggctccccagtgccttagggctggcagagtgcactgcccagaagagtctgatgtagcaccattaacctgcaggccagacttgcatgggaattgggggctggagatccaagaggccggttccacaggctaactccagtgttttgagggatccgtgtgtcctcccaggcaccaggctgccactccctgccccaagtgtgagagccatcactgacttctgtctccttggcagcgataccatctgtgatctagggggtgtcaacgagctggcaaactatggggagtactcaggcgcccccagcgagcagcagacctatgactatgccaagactatcctctccctcatgacccgagagaagcacccagatggtgagatacttgcacacacacatacctgtccccacttccccaggacagcccagcaggctgcaatgggacagcttcgtctgaggagtcaccaaggctgtgtgtggtcctttgcaacttgaggctaatcattgaactttggctctcagtttctctgactgcacagagggcagggaccacatctatcagtgggaggggactgagagggcaagaggngatgtgtgataaagcccttcaaacaagtgcaggggaggaggtggctgtggcatgctcctgctacaattgcagtaaactcagtttatccgattgcgataaactctgattgcaataaactcagtgaccctcttatattacctggcctctgtgagtctcagtgcccctttaccacctgtgttttggagctctgcataccagttcttctttmcttgagccagagagggagagagattccctccagagatatctagaaaccaacctggatttttggatgttggttaggagttatgtagtgctcctgtgggtttgttctgacccctgtctggtggcataggtaatggagagttgagctgataaagtggaatgtctggagagactgtcctactcactccccagtacctcctggcagatgggggaccctcattcaggggaacaagaacttcctcagttggattgctgggaagatgctcaagtctacctatgtaactgtttttgattctctcttactccaaatccaggcaagatcctcatcattggaggcagcatcgcaaacttcaccaacgtggctgccacgttcaaggtaacagttgcaacagtggtgcagtttctggggaaagtggtttggggaaagcagggaaggggccttgaaagcagagtttgagccagagccaagttaccatgagttcccaggtcaggtagggagctcttgccycagggtctcttaaaggggtggagaagacactgggacaggagctgcccatctgcgctgtgtgtctctgggcaagcagctgctacgctgaactataactctcccacctgaagcatgggaggcgaatttctgctttcttccttctcaggaccaatgctttggagcactggctcaatcgatcctttctttctttccttcccttctcttcctttcccttcccttcccttcccttcccttcccttccttcttcccttcccttccttcttcccttccttccctttccttcttccctttctttcctccctccctttccttcctccctcccctcccttcctccctcccctcccttccttcctcccctcccttccttcctttcctccctcccttcctttcctccctccctcccctcccttccttcctttcctccctccctcccctctcttcctccctcctttcctccttccctcccttcctttcttccttccatggagtttcactcttgttgttgaggctggagtgcaatggcacgatctcagctcactacagcctctgcctcctgggttcaagtgattctcctgcctcagcctcctgagtacctgggattacagacacccaccaccgtgcccggctaatttttgtatttgtagtggagcaggggtttcaccatgttggctaggctagtctcgaactgacctcaggtgatccacccgccttagcctaccaaagtgctggtattacaggtgtgaaccaccatgcccaaccgatcctccttactttcaacactctcgtgagactctgggttctctgcatctccttttttttttttttttttttttttttttttgagacagagtctcgctctgttgcccaggctggcgtgcagtggcgcaatctcggctcactgcaacctccgcctcccggattcatgccattctcctgcctcagtcctccaagtagctgggactacaggtgcccgccaccacacccggctaattttttttgtatttttagtagagacggggtttcaccatgttagccaggatggtctcgacctcctgacctcatgatctgcccgcctcggcctcccaaagagctgggattactgacttgagccactgtgcccggccatcctggtcttatatctttctgtcatgagccctttttccaaaagattggaatgaagaaagtgctttgatgatccggggctcctctcatcctactggggtcttctcaacctgggtgcctgttcacgagtcagggctgtgtgtgcacatgctttaaagcacatgtgactgctgtcaacaaggaagacagagctaacgtgtctcaagagtcatccctttcaagatagccacccaaggaggccatttattaatattccatgctgtcagatgctcagtgagtgtattcaaaagagtgtgtgccacatctggtggtggatccatgtgagttttgagaataatgactagataagtgtcaaacttgaaagtctgaggtctcaagaagtgagaggctgggcgtggtggcttataactataattctagcactttgagaggctgaggcaggcagatcacttgagctcagaagttcaagacaaggctgggcaacataatgagatctcatctctactaaaatttaaaaaaaattagtgggttgagctaggaggattgcttgagccccggaggttgaggctgcagtgagccgtgatcgtgccactgtgcttcagcctgggcgacaatgagaccctgtctcaaaacataaataaaatgtggggccagaccccatcagtcctgcccaaaacagggtgtccataactggacctgatttaacagacaaatctgggacaggggagcctcagcagcttttatttaacttctgagctgccctgtactgacccttggttagggcacttggtttggagcaggtactgtacatggaactttgtgtaaaatgccttgggtgacagaagtcagactctaggctcaaaaatctagcctctgtcttgagaaacagaactaggacacacctttccaccctctcatttttccaaagtggatatccattgtaagaactgttcttacaccgcgctgggcgcggtggctcacgcttgtaatcccagcactttgcgaggctgaggtgggtggatcacctgaggtcaggagtttgagattagcctaaccaatatggtgaagcctcatatctactaaaaataaaaaaattagccaggtgtggtggcagacatctgtagtcccagctactcgggaggatgagacaggagaatcgcttgaacccgggaggcagaggttgcagtgagccgagctcacaccactacaccccagcccgggtgacagagcgagaatttgtctcaaaagaaagaactattcccgcacatcacttaagaagcttttgtaggacattgactatgtcttagtacctctgagaacccttgcatagagcccaacatagatatccccaccaaaaacaaaaatgtagtaagaggcagtaatgactgcagaagggacaaaagagagaccagcaaggccttgctgatgatggaggcctggagcaccatgacattaagggatgtcaatcccgggtaccccacgttcccacctcagcaacattctgagtgatcatatyccaggccktggctgcttatgcgtagtcctgtgcttcctgaggagcagcacttgtcacatatacctggtatgtttgtttatcacggttataaatcattgacttgtggctgccttgtttttagtcacatgtcactttgggcttccagggcatcgtgagagcaattcgagattaccagggccccctgaaggagcacgaagtcacaatctttgtccgaagaggtggccccaactatcaggagggcttacgggtgatgggagaagtcggtaagatgaggaccttttctctccccctcaccctgagtgtgggtggccttcctctttgggatttctgattcctgagcatcagtcttaggctcttttgctctctactccccttcctgggtgtgcagtttgggtttccattccctgtcccaacacagagtgctatcctaaactttggagtggtcaggaaagcattttcattgagctctacacttaacagatatttattaaagatcactcgctctgtgctgggctttgtgctggtgacragggttacagccacaaatggacagacagcaagccttgatggaacggaggacacaaactgctatgtcagggggtgccgagtgccaggaaggaaaacaaagcagggaaagggagaatgcatgtgggaggggtcggggcagccttcaacagggagatcagaaaatgcttgatcaaacttgatcaaggctgggcacaggtggctcatgtactttgggaggtcgaagtgggaggatcccttgagctcaggagttcaagaccagcctgggcaacatggcgagaccctgcctctacaaaaaaaaaaatacaaaaattagccggtcatggtggtacacacctgtagtcccagctacttgggaggctgaggtgggaggatcacctgaacctgggaggtcgaggctgcagtgagccgtgatcatgccactgcactccagcctgggtgacagagtgagaccctgtatcaaaaaaaaaagaagaaagaaaagaaaactgacatttgagcaaagacctagaatgagggagcagcgccatggtgactcttggagarggaagggcaaattcccataccctgcagtggtaaggggctgggactgagagagtggcagcgagacactacaggtcacaggaggacttggccatcactgtgagacagcaggcacaagaagtgttcaagcagaggaaccacatatttattattattattattttttgagacagtgccttgctttgtcacccagacttgagtgcagtggtaccatcatagctcattgcggcctccaccttgtgggctcaagtgatcctccctcctcagcctcccaagtattggggaccacgggtgtgcaccaccacacctggctaattaaaaaaaaaaaatttgttgtgagatagtgtctcactgtgttgcccaagctgatctcaaactcctggcctcaagtgatcctcttgcctttgcctcccaaagtgctaggattatagacgtgagccactacaaccagccaagtgacacaatttgacttaggtttgaattgaatagggttaattttttttcttttttttcttttttttttattttgagatggagtctcgctctgttacccaggctggagtgcagtggcgcgatctcggctcactgcaagctccgcctcccgggtccacgccattctcctgcctcggcctcccaagtagctgggactccaggcatctgccaccacacctgtctaatttttgtttgtatttttagtagagacggggtttcaccgtgttagccaggatggtctcaatctcttgacctcgtgatcagactgcctcggcctcccaaagtgctgagattataggcaatttttttttttttttttttttttttttggagacagggtctcactctgtcacccaggctggagtgcggtggtgtgatcacagctcactgcaacctctgcctcccagactcaagggatcctcccacctcaacctcctgagtagctgggactacagatacatgccacaataaatacacaatttttgtacaaaaaattagcacacacctggctaatttttttgtagacgaacttttgccatgttgcccaggctggtctcgaactcttggactcaagcgatccacctgcctaggcctcccaaagtgttgggattacaggtgtgagccttttgttttctttttaatagagctggttcaaagctgaggatctgctatgtgcagtggggcaggcctggggacagcacagtgaagttaccagatcatgctcttaaaattagaacattccacaagtaaacagtaggagaagatgctaggggtctgtctgtacaaggaggaggggagcgtggcatgggagagtgaccatcaaggtcagagggggcctttctcaggaggtagtgcttgggttgagctgggagaccagagagcagccaggtgaagctccatggagagctccacgcagagggagaagcagggccagagccctgggggaatgggctcagggtgtttaggaacagagaccaagcactggtggatgcatgcgatgagggctaaggaaagctggagagctggggtccagactgcgaacaggaggaatatgggctctgataatttggttacttgaatcttgccagtaaatatgtttcttatgtggttttttttttttggagacaagagtctcactctgtcacccaggctggagtgcagtggcgcaatctcagcttactttgcaacctctgcctcccagtttcaagggatcctcctgcctgagcctccgagtagctgggattacaggcacacgccaccacgcctggctaattttttgtgtttttagtagagacagggtttcaccacgttggccaggctggtctcaaactcctgacctcaagtgatctgcccgcctcggcctcccaaattgctgggattacaggtgtgagccactgcacctggcctgtttcttgttcttgttatcagcaagtggcctttagaaagatttgtctggtggtgaaattatgacagctgatttgtcctggatattggtcttgcactgaatgcgccaaacactgatcatggctgtaaaaggccctttgcagggtcacatggacttgggcccttatctgcagacttgaattatggatttttttttccttcccttgcagggaagaccactgggatccccatccatgtctttggcacagagactcacatgacggccattgtgggcatggccctgggccaccggcccatccccaaccagccacccacagcggcccacactgcaaacttcctcctcaacgccagcgggagcacatcggtaggttccagcctccccaaaccttacaggaaggaaccatctcatcttttccactaggatacagtcttcttcctctgttccctgggggcatagaggaaatacagcgggagttagtgcatggttggtttgtggatctctgccaatttttttcctgtcctgattaaagtagtataatggaaggacaaaggattttaaaattggatccaagttcaaattgtggccgggcatggtggctcatgcctgtaatcccagcactttgggaggccgaggctggcggatcacctgagctcaggagttcgagaccagcctggccaacatggtgaaaccgtgtctctactaaaaatacaaaagttagccagacatggtggtgcatgtctgtaatcccagctactcgggaggctcaggcatgagaatcacttgaacctgggaggcggaggttgcagtgagctgtgatggcaccattgcactccagctctgagcaacagagtgagaattcgtctcaaaagaaaagaaaagaaaagaaaaacttaaaaatcgttactcttactttttgctgagagagcaaccttagccagtaccttgtccacccagggcctcagtttgctgatctgtaacatgggataatattaattcgtatcttagaggattattagtacttttggaagcagcttataaagagcattgctgtgcataatttttattacgagttttctttggggcctttaaggaccagtggcttttttcccaggtgtgactcttacctcttacactctctccttatctcaccccagacgccagcccccagcaggacagcatctttttctgagtccagggccgatgaggtggcgcctgcaaagaaggccaagcctgccatgccacaaggtaactccctgaggcttcaggcatgttgcagggagtggccttgcggtaccctctgtatctctctcccctttccctttcccccctgggctggcagaggcagatgaacagcggtttgggttttgcaatgggagtgcacctgggacacgaggatggtatgacttgagccttccctgtgggcgctcctgaggcagaggacccacgccgtgcctggtcgcctcaactccccctattctcttctacccctggttcttcttatgggggtgtggactgggcagggaggctgtggaggagatagggttacagaaatyccaggaagtggaaagttctctgagactcttctcctgagtggagggcagacaccgggaccccaggacggcagagccagctcatacracagcagttcccaggccacccccaccatcttggggccctaacagacattccctcctttgaatccccagcaagaaaagcccccgcctgtcagcccatctgtatttcaactaatttttctctccgtgtagatgtgattcctgccggccagcccttgcagccagctctacataagtggtgttagttacccctgggctggtatacctgtgcagcctcttcctgggacacactttgctatggcattttggaaaatagtgacactgtcccaaatcagcatccttgtccatggcacgggtcaaccccatgctggccaatcatctcatagtgtttcatggagacaaaaagggattggcattaagakggtgggactgcgccagctagagagcccagagttcaagtcatccagctgtccctgcagagggcctgggggaggcgctggtgttgagcacatctgcccagcctttgtcctcctcctgccccctctctgcccgtttggtctttgctctttcttgcttccattctgctcatcggtgctttcacctcttctgctggccttactccgttgtccattgcagaacaggagagggatgrtgagggctttagccctgaaaggcttgtccatgggacccttccctgttcccaccctctccctccaaagcctccagccatcagtgggtcactcagttgccttggtcattttctttgacagattcagtcccaagtccaagatccctgcaaggtaggatgcccccaccctgcccccactccgygtgtggctttgttagcgggtgacagttttactgtgtgctctgtttccccctcccctggtgggttgcagtgtcgtctggtctattttctgtccctgccttgatgtggcctgaccccaagtcctaagtcttcgctcttcctcccctcctatccgtgctcagtacgcgccccactcagtcctctcctcactgtgtggctgttyctggctccaagcttgggaaggggtagagattttggaaggagcaagagccagacccacagccctggagagtgtagtggtgtcaaggagagagtgtcgcctgggaaggagggagccatccaactaaatggggagtggcagagagtcgtgggcgtctgtcactgctggggtgcagaaggggagccacaagtcacccctgcttctcatttacatctcctgatgtcattttcccacctttcctgcctcggcttcaccactgccagcttcatcctcaagctccagggaccagtttatctttttctggggttgtggtggaggaacaagagaggtgaagaaggaggtagacggaagcgcagaagggtgtgcagcggatctagtgactgggtaattggaaggggtatgagctttgtctggtgtatgaggtcacattttacagtggatacttctgtgcatgcgcattcacccaccagcctagctgagtagattaattggttcatggcatcagagcgtccatttaactttgacattcacagccgtggaggcggggaagtctttgttgtccccttgctaaggggaggggaaggagtaattggcagggtcgataaccagctggaaaggcctggaatgcagcactgtggccacctggctttaatcctgrtgtttttgcctctggaaaaagttaagagcagagtgagcccagtgtggaaagaacagggaccagccctggttctccaggagctctctgtgctctgaaggggaggagggttatgaggaggggggttatccttgttactttctggagtgagagaaataaaaggagggtgtgtcagggagaacagattatggctgagcgagccctcccctcagcgaggccagaggaggcctggtgtagggggcatagcccctggcacagaggttctctstggagcctctctgctgctggtgggctgaggatacacccttcagctttggtttctctgtgcttgaggaagggccactttacctccacccttcctgctggagatgctggtaggttggtagattccaggctttgtcttgatttctgtagctggcagggtagatagatcagaggcatgtgcacgtgcgtcacctggcgggggtgacatgatgcaggcttcccctgaggatggcgggtcatgaactcacacttatattctccctcctcactttcacagttgagctgcattttaagtgattgtgtaatcctggctctgatgctggatgacctcggacctcaatcatttggcatctctgggcttcagtttcctaggactgggaagtgggagaactggattaggtggctccccttgttctgtgatctcatgtctcagcagaacccggggggtctaggtgacagtaaatcccaggtatttgcaacatcaggaaccttctgtcatgagaagctgtaaggctgtgatggaagaggcaggcctgtacagggatttaatgagaccatgaacttggttagccaagcctgctctagtacagtaggttaattaataccagatgccactgggctagatgcatcattcttcctaggggagctcagaacctccctgagggctgctttcctcctcttggacttgcagggacccagaggggaaagtcaactgcctgaagcgtggtaaaagtcctttccctttaggctaaggactgcacttttttctttttttttttaaatatacttgctgcattaaaattttctttttaaaatttttgtgggtacatagtaggggtgcatgagatattttggtacaggcgtgcaatgcgtaataatcgcatcatggaaggtttttctttgttgtttttttttttgaggtggggtctcactatgccgcggtggctggtttcgaattcctgggctcaagtgatcctcccatctcagtctcctaagtagctaggactcaagcacgcaccactatgcccacctagagaactgcacttctaccagctccttttgttcccttaccctttttttttttttttttttttttgagacagggtctcactctgtggcccaagctggagtgcagtggtgcgatcttggctcgccgcaacctctgcctccttggttcaagtgattgtgtgttggtttcccaagaagctgggattacaggtgcatgccaccacgctaattttttttttttttttttgagatggagtcccgctctgtcacctgggctggagtgcactggcacgatctcggctcactgcaacctctgcctcccgggttcgagcgattctccctgcctcagcctcctgagtagctgggattacaggtgtccaccccaccacacccagctaatttttrtatttttattagagacagcgtttcaccgcgttggccaggctggtcttgaactcttgagctcaagtgatccactggtctcagcctcccaaagtgctgggattacaggcgtgagccaccacacctgacctgcgccttacctcttaagtgcccactggagggtctgtccaagagcactgtcctgagcaggaaagagccacctggtagaagggagaaggacaggaaaaacaggagagcaggttgagggcactggccctgtgtaactagcttgctgctcctgccttgtgcagagccctggccagaaccacagttagcgataaggctgctgtgtcctcagccccrgctgcacaaacctcttctttggacctacactgacctagaattcatgctgattcaaaccctgactggagctggttttatgtccagatttacagggtaataagcattgttggaacataagtcctgaacccaccaaaattgggcgagctaagcatttttttccaatgactttaaaaataatttgttaagacctcatttgcatataagctgatgacacaccttgcctgggaaatgaagcaggtcctataggaattatcctgggcatctttgactgtggggccyttctttctccattctttgcagagctacttaccagctagcaggccctcttagcttgatttgctctttctgccaccttcttccagaaaaatcgaggcacctcctccccaagttctcagaattctgtcctcttgacattcctttacggttgtgatgaggcatcaccctgtggacatggggcgtggaggggtctgtcaggcagccctggcccctgcaggtctccngggggtatgtgttctgggtgcactctctgtgtctttgcccaccaggaaagagcaccaccctcttcagccgccacaccaaggccattgtgtggggcatgcagacccgggccgtgcaaggcatgctggactttgactatgtctgctcccgagacragccctcagtggctgccatggtctaccctttcacgtgagttaccccatggygggaaatatctccttcctctgctaagacaaagcttggggctgggcacagtggctcatgcctgtaatcctagcgctttgggaggtcraggtgggagaantgcttgagcccaggagtttgagaccagccctgggcaacatagggagacccccatctctacagataatttaaaaattagccggatatggtggtgtgcacctgtagtcccagctacttgggagggtgaggcaggaggattgcctgagccttggaggttgaggctgcagtgaactctaattatgccactgcactccagcccgggtgacagagcaagaacctgtctcaaaagaaaaaaaaaaggcaaggcttgaggagtcagtgagctcattccctttgctggggaaggctttgcccatcctagagacagaggcagtcagtattcctgggggatctttgtcccttagatgaaaattctttgagggcacagaccatgccttttctatcttctaggtgaaattcctcccctcagcttccccttccccagtcctgacaggttgaggatatcctaattcttcttttactttctcacagtggggaccacaagcagaagttttactgggggcacaaagagatcctgatccctgtcttcaagaacatggctgatgccatgaggaagcayccggaggtagatgtgctcatcaactttgcctctctccgctctgcctatgacagcaccatggagaccatgaactatgcccaggtagatcactgggctctggagggtggggggtggggaccatgaactatgcgcaggtagatcactgggctctaggggacagagggtggggaagcaggaatggctyctggttgatgtcccgtcactgctgcctgggacaaagggctggggatttgggagtagccagtggtttaggtggaaatggttggagacacatgatcttcagaagtcaggatagtgacttagggcaggtcagtctgggcagaggctgcttatctgggcttacaaagaggctgctcrggcctgggacagtgacttatgcctgtaatcctaggactttggaaggcagaggcaggaagattgcttgaagccaagagttcaagaccagcctaagcaataaagcgagacccattctctacaaaaagcttaaaaattagtcaagccaggcatggtgactcacacctgtagtcccagctactcaggaagctgaggcaggaggatcaattgatcacccaggagttcaaggctgcagttagctatgatcattccatggcactccagcgtgggtggcagagcaagaccctgtctttaaaaaattaaataaagtaaaataaaatatacgctgggcatggtggcttatgcctgttattccagcactttgggaggtcaaggcaagaagattgcttgagcccaggagtttgagaccaacaaagcaagaccctgtccctataaaaaaattaaaaaaaaaaaagaattagctggacatggtggcatgtgctggctgaggtaggatgatcacttgagcctgggaggtcaaggctacagtgagttgtgatcacaccactgcacttcagcctaggcagcagagtgagactctaaataaataaataaataaatgttaaataaataaatgaggtggctcaggctccaccccacccccactatatcctctctgtgctatgcataactggcttgaaaactgggattggctggatgccatggcttgtgtttgttgggcggcagaggcgggggtattgtttgaggctaggggttcgagaccaacttgaacaacacagcaagaccttgtctgtacttaaaaaaggattagccaggcatgatggcactcactagtcccagctagtagggaggctaaggtaggaggatcgcttaagctcaggaggttgaggttgcagtgtgctgttatcatgccattgcactccagcctgggcagcagagtaagtcccagatcctgtctcaaaaacaaacaaaaaaacaaatcaggattaaagcactttattttatgtatgtttgtatttatttattttttttttttgagacagggcctcactctgtcacacagcctccacttcccargctcaagtgattctcgtgcctcagccttctgagtagctgggattacaagcacatgccaccacacctggctttttttttttttttttttttttgtacagatggggtttcaccatgttggccagactggtctcgaactcctggccttaagtgatccactcaccttggcctcccaaagtgctgggattacaggagtgagccactgcacctggcctattttaattaaaaaaaattttttttttttgagacagagtttcactctttttgcccaggctggagtgcaatggtgcaatctcggctcaccgcaacctccgcctcccgggttcaagtgattcttctgcctcagcctcccaagtagctgggattacaggcgcctgccaccatgcccggctaattttttttttgtatttttagtagagacggagtttcaccatgttggccagggtggtctcgatctctcgacctcgtgatccgcccgcctcggcctcccaaagtgctgggattacaggcgtgagccaccgcgcccggcaaattttttttttttttttcaatcggtcagcttcccaagccagaggaggctcagaaagactccaacatttcattataaaaatattacatatttattatagaacagtttcaaaatactgataaatactgttttgttgaaaataaatacttgaggtcccatttcagaaaaacatgactgctgctatgacggtatgtccttatctacccccttttctagatttgagcaaagggaataatactgtatgccactcatataatctgctttcttcagttgctctttccacatcagtaagcactaactggcagcatcacttttgcttttgcaaatcttgtgatgggcaatctcggattaacatttgcctatatccttaattattccctaagcataaatttctagaagttgaactactgcatcagaaggtgcaggtttgaggctgggtgcggtgactcacatctggaatcccaggactttgggaggccaaggtgggtggatcatttgaggtcaggagttcgagaccagcctggccaccgcctctactaaaaataaaaaaaatagctgggtatggtggcagacacctgtagtgccagctacttgggaggctgaggcaagagaatcacttgaatccgggaggtggaagttgcagtgagccaaggtcgtgctattgtactccagcctgggcgacgagagactccatctcaaaaaaaataaaattaggatattgattattttgttgaaaattatcatctgatcccagactggcttatttcagtttatgactggagaatataaaattgtcttgatacctagaggaagtgaaaaaatacatttgctgaaaatgagctacttcttttttttttttttttttttttttttttttttgtgaaatggagcctttctccatcacccaagctagagtgagtacagcggcgtgatctcagttcactgcaacctccacctcccgggttcaagcaattctcctgtctcagcctcccgagtagctgggactacaggcgcctgccaccacgcccagctaatttttgtattttcaatagagatgggattttacctttttgatcaggctggtcttgaactccaggcctcaggtgatccaaccgcctcggcctcccaaagtgctgatattacaggcgtgagccaccacgtccggctgctgcttctttagtttagggcagaggttggcaaactatggcccaaggcaaaacctagcacatcacctagttttagggctgttttttgtttgtttgtttgtttttgttttttgttttttgagacagagttttgctctcattgcccaggctgtagtgcagttgtgtgatctcggctcaccgcaacctctgccttccaggttcaagtgattctcctgcctcagcctcccaagtagctgggattacaggcatgcatcactatgcctggctaattttgtatttttaggagagatgggttttctccatgttggtcaggctggtctcaaactcccaatctcaaatgatctgcccaccttggccttgcagattgctgggattatagatgtgagccaccgcgcacagccaggggtttttgtttggttttaaagagacacacatactgctctgtagcccaggctggagtgcagtgatgcaatcatgcaactcactgtagcctcaacctcctgggttcaattgatyctcctaccgggtctccctgtgttgcccaggctggccttgaactcttgggctcaagggatccacctgccttagactcccaaagtgctgggattacaggcatgagccactctacctggcccctacaatactatcttgaccctttacagaagtttgctggccctggtttagagccaaagagaagtgattcctggatctgtcccatgcccctcccaccccgcctctgggctgagtgtagaagcagctcatttctcttaaacgctgaccctgtcctgtggggatggtgacaagactcggagggtcccatgaagaaaagccttagatagctgctttatgagcaggcacaggaacaggtagacaacaggagggtgtgagcttttgggtgagagtgaacgtagctgctatgactgtagcagggcttccgaaatacctgcctytcttgggtggatcactgtggtgttagctagtggagatcagtttcggctatccaccacttgtgttttcaggagatggttagagtgattacgagcagaggcctgtgggaagaatgagatgcatattggttttgttttttcgttttgttttgtttttgtttttgagatggagtctcgctctgtcacccaggctggagtgcagtggtgccgtctcagctcactgcaacctccacctcccgggctcaagcagttctcctgcctcagcctccctagtagctgggattataggcgcgcaccaccatacccagctaatttttgtatttttagtagagacggggttttgctacgttggccaggctggtctcgaactcctgaccttagaagatccaccctcctcggcctcccaaagtgctgggattacaagcatgagccaccgcgcccggctgatatgcatattgttaacattactttgttcttggaccctggaagaggacatgtggaatgggaggtgggcccttaaacggtgctgtcttgttgccctttctgaggcagagagttaacaggaagggacttttgtcatcctctagatccggaccatcgccatcatagctgaaggcatccctgaggccctcacgagaaagctgatcaagaaggcggaccagaagggagtgaccatcatcggacctgccactgtgagcttcccctccggaaagccttttacgttcgatgctatcttatgaagttcaatgcccttaggaagtttactttttgactcctctatctccctcctaggttgagaagattcaggaagtatgtgttgaaaatcagtctgtccatttttagctttttttttgagacacagcctcactgcaatgcctaggctggagtgcaatggcgcgatcctggctcactgcaacctccgcttccgggttcaagtgattctcctgtctcagcctcccaagtagctgggattacaggcacccgccaccatgtccggctaatttttgtgtttttagtcgagacgggatttcaccatgttggtcaggctggtctcgaactcctgacatcgggtgatccacccacctcggcctcccaaagtgctggagttacaggtgtgagccaccgtgtttggcctttttttttttttttttttttttttttttctttgagacggagtcttgccctgttacctaggctggagtgcagtggcacgatcttggctcactgcagcctctgcctccttggttcaagcaattctcctgcctcagcctcccgaggagctgggactataggtgtgaaccaccacgcctggctaattttggtatttttagtagagacagggtttcaccatgttagccaggctggtctcaaactcccaacctcaggtagtctgccccctacagcctccaaaagtgttgggattgcaggcgtgagccaccatgcctggctgaaattattctttgaattattttttgtttgtttttttaagaagcagggtcttgctgtgttgctggagtgcagtggcttttcacaggtgcagttataacacacttcagcagccccgaactcctaagctcaagcaatctccctgyctcagcctcctgagtagctgggattccagaagtgttctccacacctggcttatttttacttcttactgtattaaaaaaatggagctagtatttatttccaaagagctgagattacagacctgagccactgtgccgggccaagtatacgtatctgaacctgaattagtgagccatgctttacaaataaggctctcttttgttctgtatgtctcttgagagagagaggagactttcctaagcaggaaacccagtgggcaagtgtgatttctcttggtcattctctccccagcctggccagaaggggctgggcagtaatgcaggggctttgtgattctttgtggtgaatctggaagtcaccttcctccctgattgtggtttctgcccccacaggttggaggcatcaagcctgggtgctttaagattggcaacacaggtgggatgctggacaacatcctggcctccaaactgtaccgcccaggcagcgtggcctatgtctcacgttccggaggcatgtccaacgagctcaacaatatcatctctcggaccacggatggcgtctatgagggcgtggccattggtggggacaggtaatcagctgggaagccaaggaggggcttcctgctttgagagcagtgggctaggagacgatgctgtgtcctgcaggctgcttgctgcccctgagttccaggcccgcaggaatgctgctgaagtctaaacaatggggcatcactgctcttgtctcaggactgacagagcatgaaatcggaaaacacagaacagggcaacaatgtgcaggaggggcgactgggctttggggataattctgtttgttgtgattggccatagggaggcagcagagtacagtggttaggagggccagttctgaaattggactaaagaggttcaaatcccattttccctctttagtagggggtgggtggcaggggccatcctggtccggttacttaacctccctagacctccatcatttttacacatcaaatgggtaaataatacccccacctcatggggctactggaggaataaatgaattgtaatacatataagtgtctgagccaggrcctgcgttcagcaggtgctcagtgagtttttattgtagttaataatagtatcctcattatttttggtagtgggaacactgatcagtaggtcatgaatacagtattatatctcagagtaacgtctggcacttagtaggttcataataaatgttagccattattgtttattattcctactattactactgctgtcrggcttagaaaccaaaagctgttgagatagagtcaccttgttcgtctccctggctctaccacatgatttccgataggatgcctgggtgaggaagaactctcaccaaggtctttaggggtgtagcctgggaatccccagtccttgggtactgcctgaccaaaggctcagggaataagtctaggaaatgctgcttgtttagattgtcttcttagatttataatgatcatatcaaaagacatgaagaggccaagaacagtggcttatgcctataatcccagcactttggggggctgagggaggaggattgtttcagcccagaaattcgagactagctgaggcaacacagtctcgaatttggtagagacccccatctctaccaaaaaaaaattagccggatgtggtggcatgtgccagtagtgccagctactttggaggctgaggcaggaggattgcttgaacccgggaggcggaggttgcagtgcaccaacatcgcaccactacactcaagcctgggtgaaagagcaagacttcatctcagaaagaaagaaaatatgtgtgtgttcttaggttttttttgtttgtttgtttgtttttgtttttgagacgatcaaaaaattcaagcgatcctcccgtctcagccacctgagtagctaggactgtacaggcgcccacgaccacacctggctgatttttgtatttttagtagagacggggtttcgccatgttggccaggctggtctggaactcctgacctcaggtgatccaccctcctgggcctcccaaagtgctgggattacaggcgtgagccactgcgcctggccggaatttgtggatatattttaaaacaactgcaccagggcgtactttctaagtcatctcttactgctgagcgaacctctctgggcttattttgtgcccagtcttttcctttgcaagttaaatagctccaactccttccctctttcttctcttctgttccatttgctaccttcccctgtccattattgctggggcatctctggacccttactggccatccacatccccccaaaatccagtgtacccagtacaagtgtgcttcctaaccctgtacacacttccccaggcctcctcctgatcctgtatcctgatactccctgctctcaacaggtacccgggctccacattcatggatcatgtgttacgctatcaggacactccaggagtcaaaatgattgtggttcttggagaggtgagttactttaaaaaaaaaaattatgattttaaaactgtaatgcatgatctcagttttcaaaaaattaaaacattttggttacatgtaacttaaagggacagtccctggtaatcccatcccctagatgctggggcctcaaggttgtcactattagtactgccatttatgtttcagagaagggagttcttaatctcccagcatcccaaactttagcgccaataagagagaagctctgctctggctggccatggtctctacctggtgggcagtggaaagctggagtaaaaaaagtgcatttttttggccaggtatggtggctcacacctgtaatcctcccagcactttgggaggctgaggcaactgggtcacttgagatcaggagttctagaccatcgtggcctacatggtgaaaccccatctctactaaaaatataaaaattagccaggcatggtggtgcacacttgtaatcccaaccactcgggaggctgaggtgggagaatcacttgaacccaggagacagaggttgcagtgaacagagataacgccactgccctccagcctgggagacagatcaagactccgtctcaaaaaaaaaaaaaaaaaagcaaaaaaaaagcgctttttaaaaaatgtgatgacttttggatagaacggttaaaaaaaattttctaaatactaaaaaatttgggagtcccataaccccatcccttgtttgcacctctgaaggcaggtctaatcctaaatcatgttatatttctagattaggaagggggagtcccagagattcctctaggagacctgctgtttgttcctttagaaatcttccttgtgtccaggctgaaattaaactccttttatttggccaaagcccgtgtcactccattttctatccagtttttacgtcaggatgggctgcactaactyggctttttctcattccccattccttggcagattgggggcactgaggaatataaratttgccggggcatcaaggagggccgcctcactaagcccatcgtctgctggtgcatcgrgacgtgtgccaccatgttctcctctgaggtatggctgagatgggtcacttctgggctgggagtggggattgcaagagggggcatttgaggcgaaccaggtaatcatcttattaattcgcagctagttccttcaagaaacgtttgttacttgcttggttactacaaagtccagccagggccctgctctctgggagcttatatccagttggaggagaccaatttataagcagattaaagctacagtcaggctctgagtccctacttggcgtaggyagcaaccagctgtctggagaagttgagatggcatccctgagaaggtgatgtttgaactgtagtttaggggatgagaagggctttgctgatgaaagggaggccaaggagggagaaggacacagcctgggctcagctgggcggggcttggtgagatgttttgtgtggggagaggtggtagaaggaaaggtttgttcttgatgtgttaaaatgataaaatgtacttgaaagtgtctggcgcacctgatggtgttgaatataaacactccttgggcttctgctgtctgctaagcttctgagctatctgtcttctgctgggggatcatacgccagacttcagcccctgtgcttcggcttagagaaccctttaccaccttgaaggtggctcacgtgatgatgatgaaattgaaggaaaagccgggtacctggtgtgtgtacaagaatactctgcagtatcattaacagcaaaaactggaaacaacttttttttttttttttttttttttttttttggagacagggtctcactctgtcgcccaggctggagtgcaatggtgtgatctcggctcactgcaacctccgcctcctgggttcaaatgattctcctgcctcagcctcctgagtagctgggattatgggcgcatgccaccacacccagctaatttttgtatttttagtagagatggagttttaccatgttggtcaggctggtctcgagctcctgaccttgtgatctgcctgcctcatcctcccaaagcgctgggattacaggcgtgagccaccatgcctggcctggaaacaacttacatgcttatcaggaggggactgtcagcatggcatatccacaaactaatggaaaacagggcaggcatgcaaagaaggaggtggaacttgatatgttgatacagaaagagtttaagatacattacctgtaagaaagggcagagttcagtaaatgcttataatatccattttgtgtaaagtgtgtgtgtatgtgggttttattttttatttttccatgtaagtaaaaggggaggagaggtccagaatcctgcccatccctccagggtgagctctgcttgcacaggctttaaaatcagaccttggtagatctgtgtagccagacgtggtggcaggggcatataatgccagctactcgggaggctgaggcaggagaattgcttgaacctgggaggcggaggatgcagtgagctgagatcagatctttaaaatcagatcttggtagacctgggcaagtcatttagcctcttggtaactgtttcctgagctgtaaaatgaggatgccatgccgcaaggttgttgtatgacttaaatgaggaagtaattgtaaaggtctggcgtgcataggtcttagaaacttcttttttttcccatgccttgtcagtccgcttattccatgaagctgttcctgattctccttttttttttttttttttttttttgagacggagtctctcgcctaggctggagtgcagtggtgcgatctcagctcaccgcagcctctgcctccctggtttaagcaattctcctacttcagtctcccaagtagctgggataacagccaccacgcccggctaatttttgtatttttagtaaagacagggtttcaccatgttggccaggctagtctcgaagtcctgacctcaggtgatccacctgcctcggcctcccaaagtgctgggattacagccgtgagttaccgcacccagccgattctctttcttcttgagtgctctcccccaactccattgctctccccccaactctgtactcgcccaacagccaaaaaccagtcaccctcctccattgtttctcctggcttgctttgcattaccagcccctccccctttccaccccacctccccatccccaccatgatcaggacacttctaagagggtgagcacctcgcatttcagtatctggtggcactcatcrccccatgggtggggtgggtccttgaattattttaggtttttgtgtttttttttttttgagacggagtctcgctctgtcgcccaggctggagtgcagtggtgcagtctcggctcactgcaagctccacctccggggttcacgccattctgctgtttcagcctcccaagtagttgggattacagacgcccaccaccacactcggctaattttttttgtattcttttagtagagatggggtttcaccgttagctaggatggtctcagtctcctgacctcatgatccacccatctcggcctctcaaagtgctgggattacaggcgtgaaccactgcgcccagccctttagttttgttttttaaataattcatctcccttttagaaattttgtttttagttttgagaaatccagagttacaagaaacttaacttctttaaacctagggtttctgagtatagactctcttcttcccacccatctgccgatgcagattaaatcctacaaagaacgcattgggaactcacgctttaaggtgtctttcaacctttgcttacagagcagcagttcctaaccttttcacctttttgttctgtttgcatggtgaagagcacaggctgaggccagattgcctaggttcaagtgctaccacatgctacctgtgtgacctgggataaatcactttacccatctgtgctcccatttccttttttataggaaacgatcatagctactgagattgaatgagtaaaactcttagaaaagtgcctgaacatagtgttatgtaaacaggttagatagtactatgattactctctgcaccccatcctaagacaaggctttgcatcagatgtcttgtgggttaatttcctccatcgcttgattaaagactcagtcacgctgggcgcgctggctcatgcctgtaatcccagcagcttgggaggctgaggtgggtgggttgcttgagtccaggagttggagaccagcctggaccacatggcgaaaccctgtctctactaaaaaactacaaaaaacttttagccaggcatacacctgtggtggcatacgcctgtagtcccagctacacgggaggaggtgggagaatcacccgagcctgggaggttgaggctgcagtgagccaagatagcaccactgcattccagcctggggaactggagcgagaccctgtctcgaaaaaaaaacttctctgtgctttggtttccttgtctgtaaaatggaaatcatctattgtacctattcagtgagcttgcttgaggcttaaatgaagtgattcatgtaaagtgtttagcacactttacatgggattctatgttcactcttgggggattagcagtaaagctactttcctttgctttccaggtccagtttggccatgctggagcttgtgccaaccaggcttctgaaactgcagtagccaagaaccaggctttgaaggaagcaggagtgtttgtgccccggagctttgatgagcttggagagatcatccagtaagtggaccttggggaggatgccggcctccccctcctttccaaatccctcctgagacagcagcctctcccacacagggacatcatgtattcctggtccctctcggtgtctagcgcagctgtatggatggttcaaaatcctctttctctttggctttccttttgttttatttagtttgtggaggcagtaggtctaggctggtattaaaatgtgttgagtttctgagcctacctatttggctgggaggtggcagccatagatgagagckccacatgaaaatgtttagagagtgttatctatgattgatagagagttattagatatcctgtgatctcttcccatttctacctcttaaacctgcctggactcccggctgtgtccttccttgccatccagagattgggacatgaggtagtagggagcagagggcaggtgcagtcttggctagaacttcttttcatttagttctcagaattcagcaggtaagagtaaactaagaaacctacagtgtttgggttagatagagcattcttgggatgtcttacaggagcccaaaataagaaaatccacatggatgtcttttttttcctgcctcccaggtctgtatacgaagatctygtggccaatggagtcattgtacctgcccaggaggtgccgcccccaaccgtgcccatggactactcctgggccagggtaggtgccttaaatgtctctaacagtgtgagcaagggagatctgtgggtctatggtggtgggtttcgcgttgatttgccttgaactcttggaaaccaggccttctgtattagtcggggatctcttagagggacagaactaataggatatatatatataaaggagagtttattaagtattaacttacatgatcacaaggtaccacaataggctgtctataagctgaggagcaaggagagccagtccgagtcccaaaactgaagaacttggagtcygatgtttgagggcaggaagcatccagcacaggagaaagatgtaggctgggaggctaggctggtctctcttcttcacatttttctgcctgctttatatttgctggaagctgattagattatgctcactacactaagggtggatctgccttccccagcccactgactcaaatgataatctcttttagcaacacctacacagacacacccaggattaatactttgtgtccctcaatccagtcaagttgacacttttggaggtcaaggtggaaggactgcttgagaccaggagttgaaggctgaagttagccatgactgtgccactgcactccagcctgggtgacagagtgagaccctgtctgtaatttaaaaaaaaaaaaaaaaaaaagggctgggcctggtggctcatgcctgtaatcccagcactttgggaggccagggtgggcggatcacctgaggtcaaaagttcgagaccaggctggccaacatggtgaaaccccatctctactgaaaaaatacaaaaattagccaggcgcggtggtgggctcctgtaatcccagctactcgggaagctgaggcaggagaattgcttgaacctgggaggcagaggttgcagtgagccaagatcgtgccattgcactccagcctgggcaacaagagcgaaactccgtctcaaaaaaaaaaaaggagagagagagatagagaacatattcatgttgtttttgtaataaaaatgtaactgtaaagcattttaaaaattcatagaggataattggagaaataggattggactaaattggctgatttgcctcaactctggaaatgggaaattcaggaattcagtccccgtcccctgggtaaaagacatattgaagggctcccccatttcttttttttttttccttttttattttttatttttttgtattgatcattcttgggtgtttctcgcagagggggatttggcagggtcataggacaatagtggagggaaggtcagcagataagtgaacaaaggtctctggttttcctaggcagaggaccctggggccttccgcagtgtttgtgtccgtgggtacttgagattagggagtggtgatgactcttaaccagcatgctgccttcaagcatctgtttaacaaagcacaccttgcactgcccttaatccatttaaccctgagtggacacagcacatgtttcagagagcacagggttggggataaggtcacagatcaacaggatcccaaggcagaagaatttttcttagtacagaacaaaatgaaaagtctcccatgtctacttctttctacacagacacggcaaccatccaatttctcaatcttttccccacctttccccctttctattccacacaaccgccattgtcatcatggctcgctcrcaatgagctgttgggtacacctcccagacagggtggtggccgggcagaggggctcctcacttcccagtaggggcggccgggcagaggcgcccctcacctcccggacggggcggctggccgggcggggggctgacccccccacctccctcccggacggggcggctggccgggcggggggctgacccccatctccctcccggacggggtggctgccgggcgaagacgctcctcacttcccagacggggtggctgccgggcggaggggctcctcacttctcagatggggcggctgccgggcrgaggggctcctcacttctcagacggggyggttgccaggcagaggatctcctcatccccacatctcagacgatgggcggccgggcagagacgctcctcacctcctagatgggatggcggccrggaagaggcgctcctcacttcctagatgggatagcggccgggcagagacgctcctcactttccagactgggcagccaggcagaggggctcctcacatcccagactatgggcggccaggcagagacgctcctcacttcccagacggggtggcggccgggcagaggctgcaatctcggcactttggraggscaaggcaggcggccgggaggtggaggttgtagcgagctgagatcacgccactgcactccagcctgggcaccattgagcactgagtgaacgagactccgtctgcaatcccggcacctcaggaggccgaggctggcggatcactcgtggttaggagctggagaccagcccagccaacacagcgaaaccccgtctccaccaaaaaaatacgaaaaccagtcaggcgtggcggcgcgcgcctgcaatcgcaggcactcggcaggctgaggcaggagaatcaggcagggaggttgcagtgagccgagatggcagcagtacagtccagcttcggctcggcatcagagggagaccgtggggagagggagagggagaccgtggggagagggagagggagaccgtggggagagggagagggaggggggctcccccatttctttagccacgtatctcgtcccccctttttttttttttttgagacggagtttcacttttgttgctgaagctggagtgcaatggtgcgatctctgctcactgcaacctcctcctcccagattcaagcgattctcctgccttagcctcccgagtaactggggttacagacacataccaccacgcccagctaatttttgtagtttcaatagataatggggtttcaccatgttggccaggctggtctcgaactcctgacctcaagtgatccgcctgccttggtctcccaaagtgctgagattacaggcataagccactgtgccctgccccattacgttattgttatggttggcagctatatctgaagtgtatgtaagattttccctttggattcattttaccatttcttacccaggtgaccttgggctggttamtgagcctctctaagcctcatttttttttttttttttttgctataacacaaggaatgcttctcctttgtgaggttaaaatgaagcaatgggctggatgcagtggctcacgcctgtaatcccagcactttgggaggccgaggcaggcggatcatgaggtcaggagattgagaccatcctggctaaaacggtgaaacctcatctctactaaaattacaaaaaattagctgggcgtggtggcaagcgcctgtagtcccagctacttgggaggctgaggcaggagaatggcatgaacctgggaggcggagcttgcagtgagctgagatcgtaccactgcactccagcctgggcgacagagcaagactgcgtctcaaaaaaaaaaaaaaaaagaagcaatggactgggtctcacgcctgtaatcccagcacttggggaggccgaggtgggagaactgcttgagcacaagagtttaagaccagcctggacagcatagcaagaccctgtctctacaaaaaaattttaaaattagccaggcgtggcggtgcgtgccttgttgccccagctactgggaggcatagctgggcagatcgcttgagcctagctaggagtttgaggctgaagtgagctatggtctcaccagtgtactccagcctgggcaacagagagactctggtccccctccagaaatgaagcaatggatatgaactgcttaggctatttcctagcccagcaaatgctcagggaaggatagaaatagagctgakagtgctgatgccaagtggtgtcatgggtcctcctgttttctatgtccaaaatgatctaatgaaagggcttttgcacttctttcttgggaaaactttgagagttgttacttggctgccagagtttacgacattcctggggtgctttggttctgagagtacacacagcagggcagtcctggaaaaatctgtggtggtcaccagggccctgcttccctcttccccatctctgcccaggagcttggtttgatccgcaaacctgcctcgttcatgaccagcatctgcgatgagcgaggacaggagctcatctacgcgggcatgcccatcactgaggtcttcaaggaagagatgggcattggcggggtcctyggcctcctctggttccagaaaaggtgagcatggagggcagaagattacagggccctgcagctcagagttaatgattttcccccaacaaaggggtgggagtggacaggcctggggagtgtgtccaagatcaatctttggggccacaggtcaattgagcggccagaggaaggacacataaactattcctaagtcttccaaggacagaaagtccagtcacatgagccactgcacccaaccaaatgcagatctcttgacagcaagatagaggttaggcaggagagaactggaaagatgtggtggcctaaggagtgtgggcctggtggagctgctgaacagatagaaagtaccttatgggctaggcgcggtggctcacgcctgtcatcccagcactttgggaggccgaggtgagtggatcacctgaggtcaggaattcaagaccagcctggccaacatggtgaaaccccatctctactaaaaatacaaaaaggtagccaggcatagtggtgcacgcctgtaatcccagctaatcaggaggctgaggcaggagaatcacttgaacccgggaggtggagtttgcagtgagccaagatcacaccattgcactccagcctgagcaacaagagcaaaaatattccgtctcaaaaaaaaaaaaaaaaaagtaccttgtgttcactttgcaaatttgtttctcccatcagcttgaatgttagaaaaaattggttttctctgcaactcccaatcttagccctcccgtgggactgacggctgggcaggggagccagtgagtatgtgattcacagagccctgggcttaatgtgatgctgggcagaaggccaggtcaatgtctttggttgtgtcatgccctcacctgcagagagatgggtcttggtcctgctttggacccttcctgggaaaagttcacgggttataacacctgagcaggtctctctctgtctgctcctgcctcccacctctccatactttgttcctgattcttagttgggaggttgaatactacaggaatgaggcatggggcctcctacactgtgaagggacagggttctcacctcctgtcagtctggcacatggagcatagccacaaatacaggtcaaatcctggtacaggcaactcatgctgaaaatcactgatcaaagaatagattcaaaactctggtttcaaactctgttttacaaacagtatttggggccgggcgcggtggctcatgcctgtatgtaatcccagcactttgggaggccgaggtgggcagatcacttgaggccaggagttcgagatagcctggccaacatagcaaaatctcgtctctactaaaaatacaaaaattagcctggcgtggtggtgcgtacctgtagtcccagctacttgggaggttgaggcaggcaaattgcttgaacctaggaggtggaggttgcagtgagccaagatcacactactgcattccagcctaggcgacagaatgagactctgtctaaagaaaagaatcaggaggttttgccttasagttgtgtggtagtattagacttggaytggtagttacccttcttggatttgaatgacttgtttagggagatgggggaaagtacgagcatggccttgtcgaccatctcctggcctttgwtccccccactccaggttgcctaagtactcttgccagttcattgagatgtgtctgatggtgacagctgatcacgggccagccgtctctggagcccacaacaccatcatttgtgcgcgagctgggaaagacctggtctccagcctcacctcggggctgctcaccatcgtaagtactgtcatcatgggaggtgaacagtggggacactgggccttggcctcatgctgctttgccacagcagggccctagaaggagcccctgagtgtaaaacccagtgctcagggccgttcgggacacactgggttggtttgcccagctgaaggaaactcttaaagctcaaggcaacacgcacttgtttctcctccagggggatcggtttgggggtgccttggatgcagcagccaagatgttcagtaaagcctttgacagtggcattatccccatggagtttgtgaacaagatgaagaaggaagggaagctgatcatgggcattggtcaccgagtgaagtcggtgagttgttactctcctaaaaaagtgggatggaggccaggcgcggtggcccatgcctgtaatcacagcactwtgggaggccaaggcaggtggatcacttgaggtygggagttggagaccagcctgaccaacatggagaaaccccgtctctactaaaaatacaaaaaaattagccaggcgtggtggtgcatgcctgtaatcccagctactcaggaggctgaggtaggagaattgcttgaacccgggaagtggaggttgtggtgagccgagattgtgccatggcactccagyctgggcaacaagagtgaaactccatctcaaaaaaaaaaaaaaaaaagtgggatggatctactgggtgggtggtgatagtgggggcattaatttatttgggagaatacctaagctttcaactccaacatacaaagctttggatgtgttgacagatgccaaatacaaagcagctattttttccatgttataatacagattgcccttaacagtttttctgtcgttcgcttgcagtatggaaatagcagttgaaatgagatggaaaacttggtaactttggtttcccaaatgaatcttatgggtaaaagggccaaggtcaggttgaggggacatattggtcaccttcggctagataatacctcattccgcagtaacagacaactccaaaaatctcagtggcttaccacagcaaaggtttatgtctcattcacactacatccactgagggtttgctgtgcctgttctctgccatctgtgccgaargaacagccgccgtctgggatgtgctggcctcacgtcagcaggataacagcaatggcaggaccacgtgcaggctcttaaagccttacatgattcaccttcactcacatttcattggccaccgcaagtcaagtggttatttgtgacatcactggggcaggaagagtgacaatatcaaggcatatctgattgggagagaccagtgggaaaggacagtaaatatttgaaacagtttatatagtctcacacagggccggtcatttctatgtccttatattgtgctttggttagaaaccaaagagcaagagatgaggtcactggcagctgctcagggccttatggggacagctccttagcagatccctttaccctgggctccttggctctgtagctccagcaacctcatttatttggtcactccactggcctaggtggggagtattaacatgaaggtcatgcatgtgattcaggacaccaccttctaggcagccaaacacttggccatctcaggtgatacccagaggttgcttgatgagcaaggaccagctcagaaccaagcagggaaggtgggtggctctgagggacattccatccaggacttgcttgactttgctcagccagccccagctcctgagcatataacaacatgcctatgtacagcacagagcctctttctaagataatgctagacttgcactccacactcactcattcactctttgagctccccgctttctagaggatgtactgacccagctatctcttttgctgagggctgaagttgctttggtattcgatttggtatgtccctagatcatcttcctcccccactgacaggtggttaatttcattcacagcaggtctagagttttccctaaaattttgggaatactttgcctccccacactaaacacgtgtttgtttagtgttgaactttgtcacagcttgagtaggcrcagagctggcgggggcatggctggaggctggaacctaagactcttgagttggagagtggttaactttcagacctytgctgctcaacactgtaggacctggccagttccctgaacatctcagggctcagtttcttctttgcaacttaaaagtgagaacctaccaaggttgttttgtgtcccaattgagatatgagaggacttcaaaagccagcctcatggcattagcacaattggtgccacatggaatggtacacgtgggccaggttcctgaatcgccgctgggatatgtccagttctacctacctgtaacacaagtatgaacaaacacatcccagcagtgtgtgagtgttcctctgtaccgttgggttcatttctagataaacaacccagacatgcgagtgcagatcctcaaagattacgtcaggcagcacttccctgccactcctctgctcgattatgcactggaagtagagaagattaccacctcgaaggtaacaaagaaaaaacttcctaattccctcacgttggacaagtttattggaggaaayaggagccacgttacattttgattatgcagctaaaagcaaacctagttttctagaaatgttatttttgtttcataactaaatttaacagacatgcactaaatgtcaactaggtgttgggtactttgctagatgctgggaattgaactgagtcagacacagtgtcgaccagtggggctggtagaaggtttttaaatgatggtcacaattcgtagtaatrgkagtgacagtggaaaattatgaagaaaaaatgagaaataatgataaatgctttgaatttttttgccttcccagaagccaaatcttatcctgaatgtagatggtctcatcggagtcgcatttgtagacatgcttagaaactgtgggtcctttactcggtgagcattgyagctgttttcttcttcattamgtttgttgatttttgttgtttcctccaaactataaaagtaatgcatactcataatagaatatttgaaaaataaggagaggtataaagaagaaaacaaaaattgcctgtaatgctaccacccagagcaccccttttcttctcattcttgggcagtagtagtactgtctgtggggaggagggcagtcacgtgagccttttaaaactacaagttgatgtgtgttgcagggaggaagctgatgaatatattgacattggagcsctcaatggcatctttgtgctgggaaggagtatggggttcattggtgagtccattcgttgttgttttaagtgtttttttttaaaccccacggttcagctacaccacttacccatggggttgagtttctttttctttytttttttttttttttaattttctttttgtggttcagtttctacagaagaaatgtcatatcctcttaatcattgttcttaatctttcctttcttactttaacctttccccttatctttatcattgttcctttgttcttagaaatgattgctagcccaggaaaatttttttttttttttttgagactgagtcttgctctgtcaccaggctggagtgcagtggcgcggtctcagctcactgcaacctctgcctcccgggttcaagcgattctcctgcctcagcctcccaagcagctgggactacaggcgcatgccaccacgcctggctaattttttgtatttttagtagagacggggtttcaccatgttagccaggatggtctcgatctcccaacctcgtgatctgcccacctcggcctcccaaagtgctgggattacaggcgtgaaccaccgtgcccggcctatttttattatttattttattttattttttccctttaaaattttgttttaatttaaaggaaaatagaatcagatccagcagctcccttgtacaaagtccgcctcatctacctatacagtggatttggactaaacttcccactgctttgtgtctactttttttgtgtgttagaaagatttcccttccttagcctcttcctctcaccaggcttatgaagctctaataaaaaagatgtgtttgcttcattttaggacactatcttgatcagaagaggctgaagcaggggctgtatcgtcatccgtgggatgatatttcatatgttcttccggaacacatgagcatgtaacagagccaggaaccctactgcagtaaactgaagacaagawctcttcccccaagaaaaagtgtacagacagctggcagtggagcctgctttatttagcaggggcctggaatgtaaacagccactggggtacaggcaccgaagaccaacatccacaggctaacaccccttcagtccacacaaagaagcttcatattttttttataagcatagaaataaaaaccaagccaatatttgtgactttgctctgctacctgctgtatttattatatggaagcatctaagtactgtcaggatggggtcttcctcattgtagggcgttaggatgttgctttctttttccattagttaaacatttttttctcctttggaggaagggaatgaaacatttatggcctcaagatactatacatttaaagcaccccaatgtctctctttttttttttttacttccctttcttcttccttatataacatgaagaacattgtattaatctgatttttaaagatctttttgtatgttacgtgttaagggcttgtttggtatcccactgaaatgttctgtgttgcagaccagagtctgtttatgtcagggggakggggccattgcatccttagccattgtcacaaaatatgtggagtagtaacttaatatgtaaagttgtaacatacatacatttaaaatggaaatgcagaaagctgtgaaatgtcttgtgtcttatgttctctgtatttatgcagctgatttgtctgtctgtaactgaagtgtgggtccaaggactcctaactactttgcatctgtaatccmcaaagattctgggcagctgccacctcagtctcttctctgtattatcatagtctggtttaaataaactatatagtaacaatgaaggcatactgctggctcctggcatccatatcctttgatctgtattcctttgtaactgtacttttttccagacagggtatcactctgtcgccccagggctggagtacagtggcaccatcacagctcactgcagcctccatctcctgggctcaagcagtcctcccactccagcctcccaagtagctgggactacaggagcatgccaccactccaggctaacttttgtattttttgtggagataaggttctgctgtatttcccaggctcttctggaactcatggactcaagcaatccatcctccttggcctcccaaagtgctgttacaggcgtgagccactgtgcctggcctggcctgaactgtactaatagtttcagtatatatggttttaaaaatgctcatctacggtcaggcgtggtggctcatgcctgtaatcccagcactttgggaggccgaggcgggtggatcacgaggtcagcagatcgagaccatcctggctaacacggtgaaaccccgtctctattaaaaatacaaaaacttagccaggcatggtggcgggcgcctgtagtcccagctactccggaggctgaggcaggagaatggcgtgaacccgggaggcggaggttgcagtgagccgagacccgcgccactgcactccagcctgggcgacagagcgagactccgtctcaaaaaaaaaaaaaaaaaaaattagcctggagtggtggcgggcgcctgtagtcccagctactcgggaggctgaggcacaagaatcgcttgaacccgggcggcggaggttgcaataagcgaagagcgcgccactgcactccagcctgggcaacagagcgagactccgtctcaaaaaaaaaaaaaacaaaaaacccaaaacaaaacaaaaacaaaaagaaacaaaaaaaaacggataacgagtaactcattcatccctcatccacttagctggggctagatcttataaaaatcctgtattgccactcaaggctttaacaacaggtgatggtctaaggtggctttactcgacaaaatgactgcagagagcatgctacccactaaggaaaggaagcgagccatactcgcaccgacgccctgggggtaggcctggggcgaagtcttctggactgggcgactgttactgacggacctcaccaaggcaggcagagctgctggaggcgaggcggcgctgctggaggcgaggcggcgctgctggaggcgaggcggcgctgctggaggcgaggcggcgcatgtgcggccggcgggcgacctggccccgccccgcgcgcactatttaatcccagaatccctctgtgtcgtaccaacagccgcatcgttccgaggctgtggaggccgggcgcagcggcgtcaagatggcggctgcggcagtggcggcggcggcggcggcggccgcggctgcatctcttcaggtactggagatggagagcatggagacggccgccgccggctcggcaggactggccgccgaggtccgaggyagcggcacggtggacttcgggcctgggccggggatctctgcaatggaggcgagcgggggcgatccgggcccagaagccgaggatttcgagtgcagctctcactgctcagagctgtcctggcggcagaacgagcagcggcgccagggcctcttctgcgacattaccctgtgcttcggcggggctggaggccgcgagttccgggcccaccgctcggtactggctgccgccaccgagtacttcacgcccctgctctcgggccagttttccgagtcccgctcgggacgggtggagatgcgcaagtggagctccgagccggggcccgaacccgacacagtggaagccgtaatcgagtacatgtacaccgggcgcatccgcgtcagcacgggcagcgtgcacgaggtgctggagttggccgacaggtaggcgagggaggcgggagcgcggagggcggcgggcgcggagagggggagatgctcgctggcggaggggagggcagtgcctgccacggcagctcgcgagtcctgagtgaatgcattggtttcacactcgctgagcgcctgcttgggggcagccaccgcggtgggcgaggaggatgcaccatcaggtccggcgagggcgccccgcgcccaaggagctcagatactaggtgatgggacaaaagtgatgaaaaggaaagtcagtatgtggtaactgttgtgctgacgttcaaaaggaatgaaaggctagggattgaataaagatctttctgaagaggtgaagtttagatcgacctctgaatgtcaaaaaataactgaccgtgcaaagatggggaatgaatattccagacagcgcaaacgccctcaggcaggatccagtttggcttagagaagagaattaaaatatagtccagtgaggctggatctagtggatgaaggggagaaggatgcgtgagatgcgttggaataaggagtttggatttcactaagtgtgataggaagctgggtaaagaaatagctgatttaaatattttaatattattctgccactgtgttaaacggattgtagggagcaggaatgctccagagactggttagaaggcaggtaataccgtttatagagatggagaggcgtttgttttggcaattatcatcttacagatacattaacaaaaatgcctattgagcgcctattacgcatcagctcagatgcgggattctaaggtgctagggtttcagcagtgatcaaaacagacaaaagtccttttccttatcgcacttaggttggtagatggacggtaaataagtaaaatgtatagcctgttggatgattgttaaatgtatagcctgttggatgattgtcatcactgatgaaaaataaagcatggggggagtacatagaaactgctgggggagaggaagtgttttccaaattgggtggatagagaatgccctatgaagaagacgttttgctaagaaccgaaggaggtaaggtagactgtgtcaggtaggggacacaggtacagaggctctgaggtggagcttgtatgttagagaacagtggggagccagtgtggctgtatcaaagggatgcaggatgagaggaacaggagaagccccaggatggtaatgggcagggatccagatcccgtagggccttgatggcctgtggaaggacatgagcttttactctgattgaaatgggaaggtttggggcagaggaatgatgcagtctgatttgatgaatagtgctgtgctgaaaaaaggatgtggcggccaggcgcggtggcccacgcctgtaatctcagcactttgagaggccgaggtgggtggatgcttgaggtcaggagttcgagaccagcctggccaacattgtgaaacccctgtctctactaaacgtacaaaaattagccgggcgtggtggcgtgcctgtaatcccagctgttggggaggctgagacacaagaatcgcttgagcctgggaggtgggaggctgaggttgcagtaagctgagattgcaccgctctactccagcctggcggacagaacaagactctgtctcaaaaaaaaaaaaaaagaacaaaggatgtggcattggggaggagggggcaccaagggcagacgcagagagactagtgtaggaggttgtggcagtggtggtggaggcttcgattgaggagggagaagtaaaggtgatgagaactgctctggttccagatatattttgaaagtggatgagatgaatttgctgatggatttgacgtggggtataagggaaaagactgctacctttttgacccaagcaatgggaaggatggaattattaagatgtggaagattgcagaagagcctgtttgggagtaagatcaggagtttttggatttggttaaggagatccctgggaagtgcatgggagctagagatacagattggggaaaattaccgtataaatggtaactaaagccttggggctggatggtattacttaaggagtatacatagaaaaggggcagcggggagagagtaggcaagactgagccctggggttctctagaatgtaaaatagccggctgggcgaagtggctcacgcctgtaatctcagcactttgagaggccgaggcagatggatcacttgaccagcctggccaacatgatgaaaccccatctccactaaaaatacaaaaattaggccgggcgcggtggctcacgccagtaatcctagcactttgggaggccgaggtgggcagatcacgaggtcaggagatcgagactatcctagctaacatgatgaaaccccgtctctactaaaaatacaaaaaaaaaaaaaattagccaggcatggtggcgggtgcctgtagtcccaggtactcaggaggctgaggcaggagaatggcgtgaacccaggaggcagaggttgcagtgagctgaggtcgtgccactgcactccagcctaggcaacagagtgagactccatctcaaaaaaaaaaataaataaatacaaaaatacaaaaattagcagggcgtggtggcaggtgcctgtaatcccaactactcaggaggctgaggcaggagaattgcttgaacccgggaggtggagattgcagtgagctgagattacgccactgcaccccagcctgggcaacagagtgagagactggatctcaaaaaaaaaaaagaatcttaaagaggagactgatctcatggaaatgtagaaaagaaggatatcaaggagggagtagccagtcgtgtcaactctgtcaacccattagtgatggttgcaggtcagagatgccattgacaagagctgttaagccttgctttataaagaggatcagaaacgtgtaaatgttttgggggacaatcccaccaaggtaaaagatactagagcatgtctgtgtgctgctgaaaatgattcagtagaagatgagtaattggtgttacaggagcaggggaataattgcaggagtaaagtccttgcaaccaagaagggaactgtcgggatggaagaggggtgatccctttcctccctctcataaaggggtcacagctgacattctttttttttttttttttttttttttgagacaagagtctcgctctgtttcccaggctggagtgcaatgtcgcaatctcggctcactgcaacctctgcctgccgggttcaagcgattttcctgcctcagcctcccaagtagctgagattacaggcatctgccagcacgctcggctaatttttgtatttttagtagagatggggtttcactgtatcggccaggctggtctcgaactcctgacccgccttggcctcccaaagtgctgggattacaggcgtgagccaccgcacctggccacagctgacattcttataataaaagacaggttatataggacagagaaaagcatagcagattattacaggcacatttgtgctcgagagtcatacaaaatatgaaaactctaagggtgactgaagtttttataccatcctgtggttatagaaaggaataggggcttggaatgcatcaagacaggttatgggagagccaggagaggaaagcctggcaagcacaggctgtcctgttatgcaggtgaaacctcacgggcagcagctgtcagaaaaaatggatgtagcctgtgggaaaagtttctgtcagatctttaaagtgtcagaccttagcctccttagtttttcctgtgagtgcgtctttcctcgatctgagtaaggggaggcctcagagaaagcctgtttgcatccctgttttccttgctgtttacctcattaatgtagattttctctacagatgcaaatcgcccccacaaaagacagctcttcaaagctattcctgtggtttcggcccctctgaatatgtcaaatgagtatattttggggtgaaatattctggttattcttcagtgtagaatccatattaaaattggaatggttggactgcaaagtatagggtacaactgctggtggattgggtggtgggaagatgaagttcctgcttgattgtctctgttttctcaagaggc

SEQ ID NO: 94306 - DNA, 23452 bp, Homo sapiens
ggcgtggtggcaggcgcctgtagtcccagctactcaggaggctgaggcaggagaatggtgtgaatccgggaggtggagcttgcagtgagccaagatggcgccactgcactacagcctgggcgacagagtgagactctgtctcaaaaaaaaaaaacgcaaaatggtagctacattaaggaggttacagtaaattatggttaggttagaagaggagaaaagtatctcataggaggtcaatcaactggcttaaagatgctgagtgaggggacaggtgcaaagggcctaaattgaatgagaaacatatacaacgagaggggatcccaggagtaattttttggtagccttgatgaggcctgagggggtggcaactgccctcagtacaggaaggaatgccttgtgaaactggtcagctgtcatggtgaaactgcaaaaaaggaggggagctggtcccaatgtcaggcagttggctgaagtcagcagaggagcaagtcttccaatctttgtttttccagggctggtttctgttcaacttgtaggaaaaaagtctggtattggttagtaaggaaggagaccaggaccaacccctcatcttgtcatgtttgggaatcttagtttttcatgtttttctggggtctacttggtcgaggggggttctgttcagccagtttagggggcttagaattttatttttatttcacaggcacaaccagcacagctgctttggtaagtcagtgacattaaaaaaagaaatgtgtggcagggcgcgatggctcacgcctataatcccagcactttgggaggctgaggcaggaggatcacgaggtcaggagatcgagaccatcctggctaacacagtgaaaccccgtctctactaaaaatacaaaaaattagccgggcgtggtagtgggcgcctgtagtcccagctactcgggaggctgaggcaggagaatggcgtgaacctgggaggcggagcttgcagtgagcccagactgcaccactacactccagcctgggcaacagagcgagactccgtctcaaaaaaaaaaaaaaaaaaaaaaaaaaaaaaaaaagaaatgcgctagagcaagggattggtaaactaaggcccacaagccactgcctacttttgtttgcctctaagctaagaatgactttacatttttaaatagttgaagaaaatcaaaagaatattttgtgacacatcaaaattataagaacttcaagtttcagtgaccgtaagttttactggaacatagccacacctatttacatactgtctatcacctgcttttgaatgacaaggtgtgagataggaaaaaatgcaaactgctttctcctacagtattctcatactcacaatactctgaattttttgtttgtttgttttaagtagagatggggtctcactttgttgcccaggctggtcttgaactcccgggctcaagcagtcctcccaccttggcctcccaaagtgcttggattacaggcgtgaggattcacttctgacgtcaggtatgtgtggggtttcctctcccaacaaccaattctctgacaccagctgggtgacctataatttaactcaattctcacactatctacctggatataacatcagaccgcagaggtcaagggctcagtcccacaagactctccccatttcagataccaattacaagcagtaggttcccaggttacccacaacttgtctaacttggctacaataagaggttcccacaacccccttctcaggtttgatcatttgctagagcagctcacggaactcaggaaagcactttacttattacccattcattgtaaaaagatgccattcaaaaacggccaggtggaagagacacatagagacatgtatgggtttttatagaggcttcaccatgtaggtatgattgattaaatcactggccattagtgaacaactcaaccttcagtttctctccccttccccagaagtgggagtgggtgggagggactgaaacttccaactctctaatcacatgatgggttttcctaggcaaacccccatcctgaggctatccaggagcccccagccatcagtcatcttagcagcatacaaaaagacacttagcacttaggagattccaagggtttcaggagttgtgcacaaagaaatgggagcagagaacacacacgtatttactattacatcacagtacacaaaagggcagagttgaatagctgcaatagagatcacgtggccctcaaagtctaaaatatttactatatggccctttaaggaaaaagtttgcaaacctctgcacttgattcaaaaatttaaggaacaaccaaatgtgtggctctaaatgggataccattttggacatgaccaccaagggacatttttggaacaacaggaaaaatttgagtatgattttggtactagttaagatgaacatttcctgaaatggaaaggtggagactgtgattgaaaaaagcagagcacaaaagagtagcctcagtatgatcttattttgtttggtatgcctacagaagatctggaaagatagacatggtggtgttatgtgtgatttggaggaactgtattaatctgcttttgcattgctataaaggaatacctgagactgggtgatttataaagaaaagaggtgtatttggctcatggttctgcaggttgtacaagatgcatgacaccaacatctgcttttgggaggatctcagtaagcttccaatcctggtggaaagggaaggggagccagtgtgaactcattaccacagggaggccatcaagcctttcatgagggatccacccccatgagatggatgttgggaagtgacccaaacacctcccactggaccacctcaacattggagagcaaattttaacatgagatttggaggggacaaatatctaaactatatcaggaatggaatatgatgtttttattttcactgttgtttgtattttgcattttcttcttgcacagatatttctcattttttggtgtactatgtagtctaagatcaatgcagtagagattctggcatataatagttacaggtagaagtatttttgagagtggaagagtttgtaaataacacccagggaatagaattccacttgtggagacagaaaagagagtataagctgggctaaagaaattctcatgctggccagtggctccacgtgtaatcccagaactttgggaggcggaggtggaaggactgcttaaggccagcaattcaagaccagcctgagcaacatagcaggacacagtggtctacaaaaaaaaattagcctggtatggtggtgagcacctctagtctcagctacttgggaggatgaggcaggaagatcacttgagcctaggaggtcaatgctggagccatgatctaagccactgtactccagcctaggtgacagagcaagaccctgtctcaaaacaaacaaaaacccccactgttggggtatagttctaaggggcagccacttgttatgcaagtagaaaagagagaaatgtagaaagaattacaatggtcagctgtcttaaaccaaaatctaaggtaattttcataaaatgggttcaatttttcatgcaattgtcccatgtgaagcttgttccagggatttaatatgatgtttttcaaaatattgttcagaactcattattaggctaagaaattagtctagcgattcatgggcagaattttttaaatgacacaaactgaaagattaaatatcagagtaagtcatataccaaggatagaatgcataatatgatctcatttctgtttcaaaaggaaaaaaaaaaaccttgatatgttgtatttttatgaatctgtataacaatctattaaaaaattagggaaggctatacttcaaacttttaatatggttactttaggagagtggggctaaaggaaaccatacagaaaaaaatttatttcaattatttattccaataaagtcaccttctttaagaagtcttttcttgcttattttatctgatgctaatccctttactaattttcttatcaccttagcactaaagccactcattcatactttcccaaacagtcattgtactacgcccctaggaaaaaaatataaataccataccagtatctgccttaagagtttgatctagtgggaaaggcatactcatatttaattataaataatgtggtataagttttaaggagtgagtaggcagacaggcaacagggtagttggtaggcagaggaatattttggccccaaactgccactctaaaaccttgtcagaggtaacaaacagcatgcacaagtgtttatagagcagcccagggatgggctagaaaagtgggcaggactggaccacagaagggctttgtatggtgtgaaagcatttaggctatcctgaggagcgtaaatgaaagatttgaagcaaaagaaacatttagctgatttgatttttagatacaccaaaatggagtctacatggaggatggatttaagacattaacttgaggcaggaatttggttgtataacataaacacacttttaaaaagttatgtggcctttctttacggagtacttcatggctctttattccatctccctcatcaattatatcaaaggttaggatggaaaggctaagacacggcaatgtcttatttgacaacccctccccaaacccctactccaggctttcccacagcaatttcaaaacctttttcctggcacttaacatattctcccctgcatttgcttttgactgtacagtacataggtcttaggtctccagtctgaaaactgcaccactagattttacagttccacaggacttagcacaacgtctttgaaaaaaaaaaatactgcttaaataactctcagatctaaatgtataatcctaatctcttgattgccagaccacattcccaattgcccagatatctctacctggatgtcctataattatctcaaacttaacctaatccaaatggacctgggtacctctcttcaccgccaaactagtcatgcttccatttcatatttaagtacttttccaaaccctgagtcatctttgttcactctctactaccggccatgaacactcagctgctaaatgctgcacacatctcttccatttctctctcttttccattaccctagtttaagctcttgaaatgcttccctacctctccctatttcccacaaaacctacataatagctatcaggattaccttgctaaagcagaggtgtgatcactgtcatttcccaccttcaggtagctggaaaccccacaaaacgaggatcatgcccatttaaatcccgcagcattctccctctcgttctactgatgccgactggatcattgtacttgccaagtacagtttgtttttctccccattacttgtgttttctagtttctccaccagatggtgatgacagtacaactgggagctttgtgccctgtgttcctaggccagtgccaggcccacttgaggcgctcactaactatgatatgaacgaatgaatgcttgagtgaattggtccccagaagcggtcagcctctccgccaaggcagaggggaagggccgggaggtgcacgtgggatgaatggaaacatagtgattggcctttttggagttttcttcttaaaaaactgaatacattacagatgttgaaaacagcacaaaaatcataactgtacggcttgttaatttttacaaataaatacaccctcgtgaatccagaacctagatcaagaaccagagcattaccagcacccagaaacctccccgcgccctcctccactgagcggccctttcaacccttacaatgccggagggcgcaattcctgggtcctgtgaccttggtgaccgacgcccgggacaagtcagaaagacccaagggcgtggaaaacgctcctcttaccgataaacttgaagcgactcatgactgcgcatggaggacctccccagcggaagcggaagtggccgccggcaactccgcccttccggctggccccgctcrgtcacccgcagcrggcgtgcagtttccsggctctccgcgcggccggggaaggtcagcgccgtaatggcgttcttggcgtcgggaccctacctgacccatcagcaaaaggtgttgcggctttataagcgggcgctacgccacctcgagtcgtggtgcgtccagaggtaagggatggggacccaggactcggggaggtgaccctyggggccccatggaggtggagaggcccctgggtacctggaggttcaaggacttcgggaacggaattggaaggtggcctctcgcttcacagaatcctatggtagacccgggttcaaatccaggcttcgccacttatggccgggagaccttgtagagttgcttgtcgggtctgggcgtcagctttttgtttagtaaaacggacgcacgaccagcgcagagggtcgcaggaaaattaagtgaaataaaggaaagtgcctaaaattgtaattgtcatgggtccagcgctcgctcaatcgttttcttcacgatcttctcctttccaatattaacagcaataaactatgcattattttcttcagtctgcaaaactctaggagttaggaattatcttaagcttattttacagataagaagatgagcacagctggtaacttgcgcaaggtgatagagtttctaagtgtctgagccagggttaaaatttaggtctttctccaaagcatcatcattctcccacccctcccattagcttttctctttttagcttcatctagtccttttcattacctttacatctttttcacctcttacataattctctttcgacctctatccgtctgagactagtctgagaacatagtgttaaaatgtgtagattttaatcacctaaattcattgcagggtgggctaacaacccaagatgtgtgagtgccycgcctccactccagtcttacgactctccaaacgtagttttataagaaggccttctgggaaaaaaactctatggaaaatggagtaggcctggaagaattacagagggtaccctcgaagcccagattgcatatatgtgactattagaaaatcactgacatacttctcttgatttggcaggaagatggccaagtacaatgtgatgggattgttagtttcttccttgagttttccttatttatttattgatttgacagaatttgcaattcagattctatgctctatgctaaatatataaatgttagtaaatccatttttgagcagcagcagctcacggattagtggggaaaatggacatgtaaacaaatcgatgatgaaggaagttgagccatcagggattcaggtatcccaacacaaatggtaaatgtttgaggtgatgaatatccaaattaccctgatttgatcattatacattatatggatgtattaaaatatcacatgtaccccataaataggtacaataattatgtgtcaaaaaaagttaaacatgaaaaaaagaattcaagcaatactgaactatagctgggaatactaaagtccatagttctagaggaaaatgatataaactagctactatgacagttatggctcagcattttttagatctgacattctttctcaatccttgccttaatttcttcctccatttgccctcattgtgctgttctctgtggttccatcctaggcatactgtgttgttgtatgtactcgggcagcctcatttagtgctgtcaccacctgcgctcatttgtctctagagctgtagttcgaattgcttgttagatcacgactgttggctgggcatgatggctcacgcctataatcccagtactttgggaggctgaggtgagtggatcacctgaggccaggagttcaacagcctggcctacatgtgaaaccgcgtctctactaaaaatacaaaaattagccaggcgtggtggtgggtgcctgtaatcccagctactcatgaggctgaggcagaagaaccgcttgaacctgggaggcagaggctgcagtgagccgagatagccccattgcactccagcctgggcgacaagagtgaaactttgtctcaaaaaataataataaaaaaaaaattgaaaagatcaccaaccgttctctcaatctccatttatctaaattctttgaaatcaaacttgttttcctgtcactccccattctgactcttttcccaaattccctgcctccgctaatggtattattagtaattcagttactgagctttaagtctcagaattgttctcaagtatttgctccttattcctttgccaataacacacatactcatacaccatgtataattagacactggtttttataaattctctttccagtatgatattagtaactgacattatttaacacttgggatgtaccaggcactttttaaagtgtgtttatcttattgactgtttatgacaaccttaagatatacacactgttattgccactgttttacagaggaggaacccgtggcctagaagactttttttgtttgtttttttgttagacggagtttcgcttatgttgcccaggctggagtgcagtggcgcgatcttggctcaccgcaagttccgtctcccgggttcaagcaattctcctgcctcagtctcccgagtagctgggattacaggcatgcgccaccacgcctggctaatttttgtatttttagtagagacggggttttgccatgttggccaggctggtcttgaactcctgacctcaggtgacctccacctcagcctcccaaagtgctgggattacaggcgtgagccaccgtgcctggcctttttgttgttgttgttgttgttkttttttgagatgaagtctcgctcttgtcccccaggctggagtgcaaatggcacaatctcgactcactgcaacctctgcctcccgggttcaagctattctcctgccttggcccccagagtagctgggattacaggtgcctgccaccacgcccggctagtttttgtatttttagctgagacgggatttcaccatgttggccaggctggtgtagaactcctcacctcagatgatccccctgccttggcctcccaaagtgctgggattacaggcgtgagccaccatgcccggcctcatttttgtatttttagtagagacggggtttctccatgttgatcaggcttgtcttgaactccagacctcaggtgatccacacgccttggcctcccaacgtgctgggattacaggtgtgagccaccgcacctgaccagaagacagtaacttaccccaagttacacagctagtagtggcagagctaagattcaggcccatacagtctgactggagagcctattctcataacttggaagtctcaatgtctcccctgtctcctgtcaccatcacagctccgtactttcaggccctcgtcagctgtgtcctagattattgtcaaaacctcctaactgatctttgcccagtttctttagaacttgactttaacttgcctaagtttatgcagctagtgtcagagtcaggatacaaacctagctctgtatgagctaagcaatactgtttctgccaagtaacacctttcttattcatctttgtatctccagaatttagcatagtgactagcacaagatagaaggaaatggaagttgtcattcaatgaatgttgaatgatcctgcagaggttatagcttttctcttgcgaatgctcttttctttttttttttttttttttgkttaaatcctcattccmttgttggatgtaagaggagaaaaatggttagggtatatatttaatacagtatttttttgctgctgctgtttggtgggctgtagaggaagcagccatgatgatacggctgctccattgggagggttggggtaggtccactgcccatccagaaggtatcagaagtgcwgcctcctgtcagacagcaacactgaccaygtgagtaggtaacatttctaatcttcaaaatcattttggtttaagagacaaataccgatactttgcttgtttgatgagagcccggtttgaagaacataagaatgaaaaggatatggcgaaggccacccagctgctgaaggaggccgaggaagaattctggtaccgtcagcatccacagccatacatcttccctgactctcctgggggcacctcctatgagagatacgattgctacaaggtaggtgagaattatgatgactgccttctgagaaatagactttgtttcttcagtcccacacctcagcctcagaaatcacttgcccttcaaggggtagctaggagacttatttcctgacagttgtcagatgcaggcctacctcattttattgcattttgttttattgtgcttggcagatattgtattttcacagattgaaagtttgtggcaaccccgtgctgagcaagtctgtgggcaccatttttccaacagcatgtgctcactycctgtctctgtttctcagtttggcaattcttgcaatatttcaaacttttttttattattactctatctacacacagttgtggtgaactgtgatcagtcacctttgatgttactattgtcattgttttggggcacaaaaaaaccatgcccacataagacagcagacttaatcgataaatgtgcgtgtgctgactgtttcaccgaccaatagttcctccgcctctatccctctcctcagggttccctattccctaagacgcagcaacagtgaaattaggacaattaacgaccataccatagcctctaagtgttcaagtgaaaggaagagttacatgtctctcactttaaatccgttacacgtctcttcctttaaatcaaaagctagaaatgattaagcttagtgaggaaggcatgttgaaagccaaggtgggtagaaagcaaggccttttccgctggttagccaagttgtgaatgcaaaggaaattaaaggtttttttaaggaaattaaaagtgctgctccactaaacacacaaatgataagtgaaactgtcttattgctgatatggagaaagttttagtggttgggacaaaagatcaaaccagccacgacattcccttaagccaaagcctaatccaaagcaagtctttaactcttcatttctatgaaggctgagagagatgaggaagctgcagaaaaaaagttggaagctaatagaggttggtccatgaggtttaaggaaaaaagccatctctgtaacacagatgtgcaaggtgaagcaacaagtgctgatggaaaagctgcagcaaattattacacaaaatctggctaagatagttgatgaaggtggctatacttaacaacagattttcagtggagatgaagtagcctttttttggaataagataccatgtagaactttcataccttgagagaaatcaatgcttggcttcaaaacttcaaggataggctgactctcttgttagggactaatgcagttggtggttttaagttgaagccattgttcatttgccattctgaaaatcctgaggcccttaagaattatgctaaacctactctgcctgtgccctagaaatggaataacaaagcctgaattacagcaaatctgtatacaacatggtttactgaatcttttaagcccattgttgagacctgctaccatgtctgctaacacaacatccattctgcagcccatggatcaaggagtaatttccacttgcaagttttattatttaagaaatatattttgcatagttatagttgccatagatagtgattcctctgatggatttgggcaaagtaaaattttctggaaagaattcaccattctaaatgccattgaggatatttatgattcatgggaagagatcaaaatatcagctttaacggggttggaagaagttgattccaacccttgtgggtgattttgaagggctcaagacttcagcagaagaagtaactgcagaagttgtggaaatagcaagagagccagaatagaagctgatcctgagaatatgactgaattgctgtaatctcatgataaatcttgagcagatgaagagttgcttcttatggatgaatacgaaagtggtttcttgagatggagtctcctggtgaagtttttgtgaacattgatgataacaaaggacttcgcatagcacatcaacttagttgattaagcagtagcagggtttgagaggattgactccaattttgcaagaagttcttctgtgggtaaaatgctatcaaatggcatcacatgctatagaagtgtttggtgtaaggaagagtcagttgatgtcgcaaacctcgttattttaggaaattgccaaagccactccagcctttggcaatcatcaccctgattagtcaccagccatcaacattgatataatactctccaccagtaaaaagattggttttctgatggctcagatgattgttggcagtttttatcaataacgtatttcttttgtttttgtttgggagatggtctccctctgttgcccaggctggagtgcaatagcatgatcatagctcactgcagcctggatcccctgggctcaagcaatcctcctgtcctagccaaccaagtagctaagaaaacagaggcacaacaccacacctagctaatttattttattttttgtagagatggaatcttgctrtgttgtccaggctggtctggaactcctaccctcatagaatctccctgcctcagccttcaaagggctgggactaaaggcaggagccacctcacccaaccaataatgtatttttaaattatgtcttttttttggtggagggrgacagagttttgcccaggctggagtgcaatggcacaatctcggctcaccgcaacctccacctcccaggttcaagcgattctcctacctcagtctcccaagtagctgggattacaggcatgtaccactatgcctggctagttttgtatttttagtagagacagcgtttctccatgttggtcaggctggtctcgaactcctgacctcaggtgatccgcctgcctcagcttcccaaagtgctgggattacaggcgtgagccactgcacctggcctaaattatgtacattttttatgtatattatgtgaggtttgccacatcaattgacttttccttttgatagcattttacccacagaagaacttctttcaaaatgggaatcaatcctctcaaaccctgccactgctttatcaactaagttgatgtactgttcaaagtcctttgttatcagttaatcaatattcacaaaatcttcaccaggaggactccatctcaacagacatcataatgctgttggacactttatagtatagtataaacaaaacttttatatgcactgggaaaccaaaaacattttgtgacttgctttattgtgatatttgctatattgcagcggtctggaaccaaacccccagtatctctaaggtgtgcctgtactgtttcttaggtgtcagttttctctctctgagacgtcattaagacttttctttctacattcagatttaaggtcgtacagtatactttttgctataacaaagttcattttggactttaaagttaaccaacttggattggtgcttaatatttctgagatactctaattaagagttccaagtaagataagactactctggatatttagagaaggcaggtaggggaggaatgaagccagttctccttggactgatgatggtgctatttttcagcacagtctttgactctaaggtgttttcctttatctttgcttcctacttatcctctgctgttccttgcttagagttagaaacagtctggtagttgcagtggttataaaaatatatcttgatctttgtcttacatctcctgagcaggccctgtcagggataggtaaatgtgtcctgtggattgataccatgatttcctctcctgacaggtcccagaatggtgcttagatgactggcatccttctgagaaggcaatgtatcctgattactttgccaagagagaacagtggaagaaactgcggagggaaagctgggaacgagaggtgcgttctacttgtacttcgttattccttagctatgtagatggagtgaagttttgctccycacaagcagagstccagattccagccatgacagttactctgggcccttgcttctcagatatactttagtatctaagtgtatcaatttaacatttataatcaccttacaagtaagttaaagtgcattccctggtcgttttggctttgtctttgattttgcttcagatctccttctctttagtcctttgtctgacttttttgccttcttgctatactttccctcaacctgcctctccactattttcttargcatttttcagtcatgttaggatggtcagttatatttttaaaagctcaatcttgctgtagtgtgaagaatatattggagaggggaagaggagaagcagagagacccttctaggattattgcagaagtttagtcaaaaggttgtmatgactaacactagkgtggatgaagtggayatggaaggaaattgactcaggacatcatttggagggatgtgacgactgactggatgttgagggtgggtgagggatggggaggaatcaagaatggtttctggggcagggtgcggtggctcacacctataatcccagcactttgggaggccaaagtgggtgatagcttgaggtcaggagttcatgacgaccagcctgactaacatggtgaaaccccatctctactaaaagtacaaataattagcygggcgtgggggctgtgcacctgtaatcccagctacttgggaggctaaggcaggagaattgcttgaatcccaggaggtggaggttgcaatgagctgacatcgcgccactgcattccagcctgggcgacagagcaagactccatcccaaaagaaaaaaaaaagagagaatggtttctgggttttaagctttaacatctggagtttggtgatgtttactgagatagggaagattggggaagggggcacaggtgtcagagcagcaatcgagaattcattttggaagtgtgaagttttgagaatcctgtgagacatcaagtgcagatgtcagaagccaacttcagatgtggaaatctggaactcccaggagagatttggcctagaaacagaaacgtgggagttttcagttttaaaagccatggagagatgtatggaatccttaggagagagtatagagaaaaaagaaaaggaaaaaggattctttgtgcattataattgggcaaaagattgtatataaatacatttgggttagaagttttgaagatgacagacttgtgtgatagcttcctttttttagtgaaataagaggaaaagcccagaatgagtgggtgcagcatatttggagaatgtggacaagatgtgatagtcatgaggcgaggaagagcttgctggagagtagtaggatggccaggtggcaaaggcccatttgaggttgggaataatcagtgggtaatgactccgatttgctcccatatcttttttctctttagcaatactaagctgtatgagcacaggcctgagggtatatggttcggtttgtctgttgctcagagagtgacaagggacttgaggttattcgaaaggaagctgttgtcatgatggaatctaagctgaatttaaaaaaaaacaaagtcaagccagtgggggcagatgcagagagggaaggccaagttgggaggatctgtgaattggtagtctgagtttcaaggaggcatttaaacaaatgagtgggaaagggagagtgtggttggatagtgggatatttgaattcatgatttggaagttgtgctggttctggtgataacactgaggatattgacctttggaagtgtttggccaagggggacccgaaggaagggcactgtggccaaagggggcagtgttttgtcagaaatgtctcaccgtttagaagcttgaagtatatgcatggtgagccgcaggtgcattctgcaattgatcactgggataacatcaaacaattcctcctttacacatcccrtcacttcaacactattaagcagcacgtgtgactggaggcccagggcagccacaatccagaatgggtgatcttctgttaggacatttatcttggccataactagaactggaggtagtagggcagcacttggcagaactgagcatatttttacatgtrattttgtgatttatttttgttcttggttgctaggaagggggcttagaattaacatccccagcatattatgaactgaggtttcttaatggtgcttttggagaacacttagctgagacacaacaataaatgtttttctggtcagtgggtgggggctgtgacaaggagaattggaatgatagttgtcatttttctgtctgcagaataagaggaggtccagataatgaggtgatgaaaaggggtaggrggaagaataggaagggtaggctttgctatttaaaagaatgggaaaacccttaaggagacttttctaaaagtgtggatatgaaaataaagcaggtatatgtaaaaaacacttttcaatattgtgatcagatagtgtgtaatgtcagtgacacaccatagacataaagctgacccttcactgcagcagacagatttttatagtcaattagattcctttggtaatgattccttccttgcctccttctaggttaagcagctgcaggaggaaacgccayctggtggtcctttaactgaagctttgccccctgcccgaaaggaaggtgatttgcccccactgtggtggtatattgtgaccagaccccgggagcggcccatgtagaaagagagagacctcatctttcatgcttgcaagtgaaatatgttacagaacatgcacttgccctaataaaaaatcagtgaaatggtctctggtatgactgacgttcttctaagaattactgtgatgccaagtgactgtgccactgtcattgttttatcaatcgtgcatgtaaagaaaatgacaggacatgtagtcagtcagctgtgttctctgcaataaatcactgatagcatatgttaccagtaaggaaaaactgaggcagaaccagattgaggcgaacaaactctcaagtcaaaggcctaattagctgtggtaactagaaggaataaacaaagccaagaacagaaatactgaggatttaaaaataacctttttggttttctaaagatttcactaatggaacttagtttttattagaagaacaactctccctaagaagtacatagtcaacaaataagcatggaatttgtggagttctgtcaggggtggaggtttgatggttggggttaaatggtccaatctgggataaaactttgtggcgcttattttagaagcagttttccagctttgcttctgctaccgtagcttggattgtctgcggactcaaaggtaagggaataacagaactccttaaatgtttcagaagctttgtttttgttttttaaagataaagcagtttttaaaactttcaacccaaaacagctgcttttagttcttgatccctcattagctagaactgttttcaaatagtttcaggcaactaatgatcttatagccatcacaaaaatattttgtcacttttctacgtaagctcaatttgagtcccagtccatcttctaacatttgactaagacctcaaactgaattgtaacaagacttgaaatacaggacttttttaatctagtggttctttatttataacgtaggctgaagcaattgttacaatgtaggagggagacacattacacaattgttatttatacaagtttagaacaaaaaactgcacagggagaggtcaactctcagtacaaactagcaactaaagcacaataatttactgttagaaacgatttctttctttttagctgtgacactgcttttacaatatgcaaaaacacaagcagaactacccaaggtgtgttgtcacattctttctacattgaatttggcaacattttatttattcagattatactaacgtttaaaaactaaacaagtgaaaagctgtaccaaggtacagttacatccatttatttcaaaggtttaaaataccacttttatctattgtgattaccttgcagcgatttctgcttttgcaaaaaccatctcaagcatcatatgcacaatgcatcagctacttttagtcatcaagattggtgggctaaaccacaggcactactgttgtttatattctgtaaaaggagcttgtttttcaaagaaaaaagcttaaatagtttctaataatcatgcctttgctttaaagccgtaacataaaatgtccttgagcaatcgcagcagtgttcaatgttaatatatagaacaatgaccatacggtacgttactctcacatccaatgcagttatgtgttaaagcataagattaggtaattgagggttagagccaacaggaatctgcagggtgtatgaaacccaccaaactcctcctctgccttgagagggttcggtcagaaatgtgccctgttatgacctgactgctaagggacttgcttgctttcttaaacactattgtcttcaaatgtgatccctttaaatctacaaatctctgttggctttaggggatgggcagtataacaaatttaacttccacttagaaaagacaaatcttttccaaaaaacatttacccagaatacaaaaaaaggacagtatagtggtcagattcccagtgacaataaacaaatcctcctctcttcaatgtttactgtaaagccagttaactgccatttatttgaaagaagaaaagaaaaacaagcccccagattggtaaacacattggcaagttgctagactccaagctggctacccttgtcaaatctgttcgagttttttcaaaatacttgggctttttaacgcacccagcctgctgggcacagttaagtaaaaggcatttactataatctaagaattccctgctattatcatttttaaatgttttcacatttttaaaactgccttacccttttggatgtatttggattccataaaggtgagtacaatcaacgagaaactgaagtgggagattctacgactgcccagaggcagcagcatgcatggggctggttgtgggtgctgtgtgcagtccagaggaatcatgggagaaaggaagtcaagtccttaaacaccctacagaaacaaacactgcaatccagtatggcttattcggatgcatttaccatgaagctaccagaagaaattcaacctacgaggctactcttaaatgtaacaggatcggctatgttgacgatgtacccctcccatggccctccccccaatcccaacacagtctaccatttccagatttacttcactctgaatattgctcatcaattgttactcctgctcttttcatccagaacatagtatatttaaatgaagattttacctcttacccatttagtttgtacattaaaataacttgcatttgcttctaagctagactactacaatgcatctacaaaagcttgtggggaaaaaaaaagaagagtgaagtatagtaaatccttttctaaaattaactacttcgtggttcccctgccccaaccccctttatgcatttaaaattttacaaagacttgtaaaaaagttaaatggaatttggcaccttcagaaaaatcaaaagggaaactaagattaaaatgtgcagaaagaaaattgtcaatatttacaaattaaaagatcaagattatgtcagttacataggttggttttaattcttatctaaaggtgtcgagtactttcaaaagagctatattccgagttgcctacaaaatcttttgttttattatagagtggaatggatcaagacaaattaggttttattaatgaaacagttcattccccaccggcgcatttcttgtgaacctaagaaaagcgaggggctgagcgatcgtttgtcgtggtcttcttcagtttcacgccccttcggatggcgttcagcatgtcttctccttgtggagtatcccttgggctcaggtctgcagggtcactctctggaatctggcctggggagacagtggcacttgggggttcccgttcctggtcttcagcttcactttctggaattgcctgtctgtgctcctcagggatactgggcttcgggcctggaagtggagggttaacggaagcttggccgctccacattgaggagggcatgctggtgacaccttgggggccctcacccacagatggcgactcagggctgtgctccccccgctcttctggcccatctggaggggctggcaacacccctgggaggtctgggacggttggggtcttgacagggatcacgggtgtcttgatggggatgggaccagctccaatggttccccggcggacagaaggcttggtggaaggggtccgtcggatagttgcaacccctggagtgaccatagcaggtcccagggtggtggggaggccagcagttgaggctggacgcttggcttggaacatccgtcggtaggactggctgatgtcgctgtttcttggaatggtggaggacttgtcgaactcctgctgatctgcctcctggtcaccacttacagagaaataatcataatctgaaactgattataggatttgattagacatattcaagacagcagctgtgcttttttgattcttctgggctgggaggacaaaaggcacgcaaggcagggtacacacacagtctcatcccaagcttcccccaggcttctctaccatcttcagaaagcctcaccaactaagaactccgtggcagggatctttgctttgttcactgatgtgtcccaagtacctagaacagtgctggacacggtaggcactcaaatatcgtcaatggggaagaaggtaaagctgctaggctgcagcgaagctacctgcaagcgtctctgggaggaataagggggatgaaagaagacaaattctccagtccagaactcaacgtgaagatcaaacctcaaatagactagcctaggctataacatctccctgataattaactggagaggcaagggctagacaaagaacaaagctactgacagtgagtccctgacaataagggacaaagacagtttccatcagtgtcatgtgctcacttccttgtaagaccaatctcaggatgatgtgggagcttacagattaaacagctcacagccctgattctgaaccaccgtactattgataatttgggctggatagttctttgttatggaggacgtggtggggaggggccgtgctgtgtattctgggatgtttaagcaatatccctgccctgtgcccactagatgccaatagtacccctccagttgtgacaaccagaaatgtctacagacattgccagatgtcccctggggaataaaatcaccctccaataagactcactgtcttagaggttttgaatgatgaatggcatagcttttggtcaattatcatagatatattctagctgttagattttcatcttgcctgacttgtgtgtgcagtggacttgaggatgaaggaggcaggtttgatagaggatttggctggaataggttaagaacttgggcattacactctaacacacttaggttcaaactccagttctacttattggttgtgtgaatatgagcgagttattgagccttaatttccacttctgtaaaataggggtgaaaatacctaccccataagtggctgtaaagattaaatgagaaaataaccataaagtgtgtagtgcaaagtgctaaaacaaaaatgaagctattcctttgagacagggtctcattttgttgcccaggctggagtgcagtgatgcagtcatggatcactgcagcctcgacttcccaggctcaagcagtcctcccacctcagcctccagagtagctgggaccacaggtgtgtgctgctacacctggctaatttttgtattttctgtagagacaagagttttgccatgtttcccagactggtctcgaacttctgcagctcaagcaatctgctcacctcaaagtcccaaaatgttgagattacaggcgtaagccactgccctggcctgaagctattcttattacagcacatgtctccattcaaattggagactgctgtatatgatgctgcaaaacgcaaaaagctgtgaaagtccagatccctttatttattattatttttttttgagacagagtcttgctctgtcacccgggctggagtgcagtggcgcgatctcagctcactgcaagctctgcctcctgggttcacgccattctcctgcctcagcctcctgagtagctgggactacaggcgcctgccaccacgcccggctaatttttttgtatttttagtagagatggggtttcaccatgttagccaggatagtctcgatctcctgacctcgtgatccacctgccttggcctcccaaagtgctgggattacaggcgtgagccactgcgcccgaccccagatccctttcttatatggcagctacctgacaactacagatgagctccccaaagcattcccagatgacgaaaacaatcctgacacctgttagttagcgagtggtgggttgtggttaaaatggaccagcagttttctatctcctcacctggtgctgctcagaaagcctaagtgcacaccccaggctgcctcgtaccttgggaagggatggtgtcctcagagcagcagggggtggttgtctgggtgctgtagccgctggagcactgaagcgagtcccggctgctcctctgggtgtccagctgcaggccccgagacagggccagggccagctcctcacaagcctccatctcctcaccaggctgcaggttggaggagagaaatacacaggttgctttagggggggggctcaacagcactcctgttctgcccccgtgagcactacatgtctgtggggccagggggctattgacttgcttgggtcccactctgaccctagaaagttctgcctctctcattcccacacaaggtttttttcccagggactttgctgtagagcaggaagtcagggaatggagcccaggtccctccagctgcaaggctgccttggccccccagttgctggccagaatgtgatccccagccaggctgaggtggccccaaccagctactgagaacaagagcatcaccctggtggcagccgatacagtcatgctccgtggtctctgagcctcctcagctgctgcaggtgggccgctggcggtagtgggtcctcccccgttggggtccggttctcgcttctctttgcggcgctgcagggtgttcaccagaggctggtcatagggcccaggcttagcccagtcctatgcaaaacaagtgcggtcaggagccagggcctctgcctccactggagggctgcggggaccccatagacagctccccagagaaggcagctggtccccttaaggggaacctccggctgggacaagccacaggccctctgcatgccctctccaggctc

SEQ ID NO: 94307 - DNA, 13778 bp, Homo sapiens
ttttcaagtgtacatgaaacgttctccaatattgatggttcctcggatagtaaaataaattttaacaaatttaaaagaattgaaatcctacaaagtatgttctttgaccatagtggaattaaaccagaaattagtcataggaaaatatctggaaaatccccaaatatttaaaaattaaacaacacactttaaagtaacccatgggtcaaagcagaggtgtcaaggaaaattagaaattatttcaaactagaggaaatgaaaatacattttaaaatttgtgaagtgcagctagacagtgcttagaggaaaatgtatatcattaaatgtttagaaacaaaaaggggtctcaaatcaatagtctaagccagtggttggcaaactacagcctgtgggctccaacctatcacctctttttataaataaagttttactggaatatagctatgcccattcgcttacttattgtctatggctcctttatttctaagaggccagcattaccctaatatcaaaaccagacaaagacactacaagacaagaaaactatagaccaatgcctacaaacaaccaaaattctaaacaaaatttgtcaaatcaaagtccagcaataaggctgggcacgatggctcacgcctgtaattccagcactttgggaggttgaggcgggtggatcacttgagttcaggagttcaagaccagcctggccaacatagtgaaaccccaaaattctactaaaaatacaaaaattagccagatgtggtgacacacacctgtaatcccagctactcaggaggctgaggcaggaaaatcacttgaacccaggagatggaggttgcagcaagtcaatatcgcaccactgcactccagcctgggctacagagtgagactctgtctcaaagaatgataataataatacattatgaataagtagtatttatccctagaatgcaagtctaagccaacatttgaaagtcaattaatgtaactcaccatattaataaatgaaagaaaaaaacatgatcatcccaataggtgtaggaaaagcatctgacaaaagaagagaactttcttaacttgataaagggcaactctacaaggtgatactgctatatacccattatatgctaaaataaagggaacttgcaatactaagtgcttgtgaagatgtggaactcctgaaattcttaaccattgcttatgagaatgcaaaatgatatatcccatctgataaagagtttggtagcttaaaaaaaaataaagttagccatacacttatcatacaactcaacaatcagttatttatccaacagaaataggaacattggttcacagaaaaacatgtatgtgaatgtttgtaatggctttgctcataattaatacccaaacctaaaagcaagcctttaagtaatgaatggataaacaaattgtgaaacatccatacaatgggatactactcagcagtaaagaggaatacattattaatacaggaatcaacatgaataaagctcaaatgcactctgtcaagtgagggaagatagactcaaaaggctgcatattctacaattccactcatatgacattctggagaaaaccaggctgtaaaaacagactggaggttgccagggcctggaggtgggaaagcagttgacgccaaaggaaaattttggagatgtgatagccatgttttctatctttgttgtggttacctaactctaggcatttgtaaaacctcagaactatacaccaagaagaatgcattttactttatgtaaagtaagaataagtaaaattaaaattaacacatgcaaatagaacagtatctaacattatgaaaatatagaaatttttttaaaaatcggactgcttggaaaatcagtgtttaaacataaatggttacttagaagaactatatcatattttacattgcttatagccattcattgcttagtccatgactagttaatcatattatttgaaagaaaagatggttcttgagaaaaggagcattgtccagctgagatttgatgagggtagaagagaggtgaggcagtctggaataaggtgcctcctaagtagggcagaccctgaagattttccaagcttctgaggatcttgtactttacctgttattctcctctagaccttgggttctatttttgttctttttatgggcttgtcaaaaactcaaaactgcacatttgttattgattcaaacaatattcctacaacatagtattcatattcccatttcactgatggagaaactgaagccagaaagactaagggacatattcaaggcctcaaagctaataagaactaacctttagtaagatcctagtctgccaatgtcaatgtctatgaagttgtaacagctgggagcaatctcaacattctggaagcgttttttgtttgcttgctcatgggtgatcgtgaaagctccatgaacagagctgagcttcgaagcttcagatgggacaagccagtcagttaaacagtgtatcaaccccctccttggttattaataagctgggtatttcttgaaaggaattctaattcttacctactccacagagatgccagaaagatcaattagctgatgctcatctgagacagaacaaaaacaaaaatggaaaataaaaagatctataaatgattctttcctcagttattatcattgttattatcaccatcatcaccatcatcattatttctgctgagttactgcttcatcagactactcctatatcttcaatcaggggagaaacagcctgaatgaaacctggaaattaaggaattaggagagacatgcatctaaggatggggtgggagctttccatgcttaagtatcacatcgcccctcaaactttccatttctgccctgggtctattcaacactgagggaggcctaacatgaaagtgggataaaggtccccctcccttccagtccagccttcaatgccctcccttcccccaaattcccagacacctgcattgatgctgttctttctccttctgccttcaaattctcatcttttccatcaagcatgggtattttccactaatgcactatctccagaggctgcagctaaaatggtcaaagattaggtgagagtaccttcagccttctgccctgttggcacaagtgtcagggggacaccaaaggcctggcccagggtagcaggggatactgaaggggagaagtgacccaaggcgcactgatgacaatgaggtcagaggagtgctgggggagctgtccaaagtgccaggaccatggtccagcaggcaaagggtgctgggtggtgaagcaggggaaggatataggacggtggcccccaggggaaagcattctacatataaagtttgtctcatcccaccttctgtctgggacagtggcgtcccatgacattcacagtcacagtgtgtaatggagctgcaagagagggccttggagagcatcaaattcgatcctggtgttagaggcttaaatggagccaatgagttgttgcccagggacacacagagccaggattctaaagtgttcccaagtccttcctctttcaataaggccctcctgatccgacttctccctcctcttcaaacttgtaattacttattcaggggatctcttcccttcaagtctgtaagctccgtaagtgcagatattgtgtctatctggtttagcatatatccctagtgcctggagtaatgtgtaattctgtggtatatgtgtgtgtgagtgtatacattgcatgtttggatgtgtgtgtgtgtgcatggtgtaaacatggtacttgtagtatccacctttggttctctttccttgcctcctttcctcaaaagcaccgagtctttttctacttctttttttttccccactatcctcagtattttgttcagagtgagcatttgctctatgtttgatgacaatttgttgatttcaaaagaatttacaacaaagcagtgataatcatacctacattggtctagctctatttaattttaagtgtctttgtataagtgaaaattaattgctcatttttagtattgcacatttcaaagctcttttaaatgcacatcagttagtaaataaattcagttggtaggcattttttatctgttgcaggaaaatgggaagatgatccacttagtagagagaagattttttgtcagattctatttgaagaagtctattacttttccttctaatggggtaggggagaaaggcagagttgaaatggaattcatgccctgttacctactggctggccctctcaacaacttttgcaaactttctgtctcaatttcctcatctagaaaagcagcataataaaacttcattcctagggctgcctgtgagaagcagggagagcatctgggctgtgcctagcacacaaaaggcattctgtaaatgttagttttcccttctcttcccttctcatttgggcaagacttcctggaagggctaagatttataactcttctgaataataagagagtatccagacattgaccttgtactcatttccatggtttccagagtccctctccccaactgctactcttgtgaaagttaaaacacacacacagacacacacacacacacagccaccctcctccaggctttctctagcacactgtctcacttaccctctgccccatccatttcttccatttgaaactcttgagaaggaatcaccccatctgcctctatttatgtttgtttttccaaaacagctcttgtgaaatgcaaagttttaataacagagaaatgatcatttggtggattgtagagcagtaaaagctaggttggaagctgtacacacaccaaaatactgggcctgcttgatatttgtagtagggaaaggtgatctttactaaacaaaacatgcaggaaatgtgaaccaggtttcctcttcccttacttctccagcagaaattaaacaactwttacaccccacgtagtcttcagtagaggatgctaatgatgtctctgwtgccctctacatctgatcaaactttattgtctgtgtcaggctgccaattaaggcatggctctcctattgcacaaacttcccgagccaccttaaaggttaattgaatcatgtacacgcgacrctccagtggacatggggctgtagatttcctctcagacagtggatcttttgggagaacaaattaaaaaatagtgtgattgttatacagccagagtgaaggctcctagggggtagagaagaagtaaccagagcccatctttctgtctcagcctttcttcttgtccatgtgttcagctttttcatggcatctctttcaagttctcatgagcatcttccatttctgctcttctccatgcaatgccatttgctgaaaaagacagaagttgtctaaggcacgtccatttggggcattaaatctgactgaggtggccagccatggcctgacccccaaggcaaacctttgaccaaagactggcttcttccaatgcatttcctcaaaatgcacatcatccttctcaggggactgtctctaagataatatgcttatgtgattatagacctccccaaagctagaaactatgacccagaataaaccatagttttcaggatttgctgaatgaataaaaagaatcataagatcatggactgctcaaactggaaaggtctctagagatcctttccctcagtccccttacactgcagatgagaaacaggtcagaagggatgcatggcactcccaagtgtacaaggacatggcaaaaaagaaactgttgtagaatcttggtttcctgaatgagggaaatcctacagataggactggagctgtctaagcctgtttgtgaatctgctctgtgctcacccctatcagggacatccatatataaatcagcattggccattgtgaggaagtgctacaaagaactttataaatttattaaatcagatccctgaggacctccacttgatatcatctttagtcccattaatgcccttaaaaacaatttgcttgggatgacactagtggcggaggcaatggccagcaaccctctgtaagcgaggcrtggaagacatatgcttgtgagaaaaaggtgtctatgaaactatggatggtacaagaacttcacttgacattgaagagtactccaatactgaggtacagaaaaaccaagtactaactctggaagaatggcaagacaagtgggtgaacggcaacactgcttttcatcaggaacaaggacctcagctatyaaagaaacatttagatacttttcttaaaggagagagtggactgagggtattttttcctctttgcagaaaagaggttgagatgaaatggtttscagaccggggacacagcgtagttggtgtggaaatcagtgaacttgggatacgagaattttttacagagcagaatctatcttactcagaagaaccaatcaccgaaattcctggaaccaaagcatttaagagttcttcggggaacatttcatcatactgttgcagtatttttgatcttcccaggacaaatattggcacatttgacatgatttgggatagaggarcattagttgccattaatccaggtgatcgcaaatgctatgcggatataatgttatccctcctgggaaagaagtttcaatatctcctgtgtgtctttcttacgatccaactaaacatccaggtccaccattttatgttccacatgctgaaattgaaagrttgtttggtaaaatatgcaatatacrttgtcttgagaaggttgatgcttttgaagaatgacataaaaattgggggattgacyatctttctgaaaagttatatctacttacagaaaagtaaatgagacatagataaaatcacattgacatgtttttgaggaattgaaaattatgctaaagcctgaaaatgtaatggatgaattttttaaattgtttataaatcacatgatagatctatactaaaaatggctttttagtaaagctgtttactttttctaaaaaagttttaggagaaaaagatgtaactaaacttttcaagtagctcctttggagaggagattatgatgtgaaagattatgcctgtgtgtcttacagattgcaagatattttatcaatcagtgtgtgttacctgtacaattaaaaaaatattttaaaatgcaatgcatattaaacataatacacacagaaaaactggcatttattttatttttttgagatggagtttcgttctcgttgcccaacctggagtgcaatggcacaatctcagctcactgcaacctctgcctcccaggttcaagtgattctcctgcctcagcctcccaagtagctgagattacaggtgtgcrccaccatgcccagctaattttttgtatttttagtagagacagggtttcaccatgttggtcaggctggtctcgaactccagacctcaggtgatctacccacctcagcctcccaaagtgctgggattacaggcgtgagccactgtgcctggcctgacattctttatgaaatttagaattgttgaaaaaaatataacacttcagtagggttcaaggtggtcccaaaagttatataaaagattagtttttactataaacccttgtcttttactcagatcctagcatcccttttcacatggtttctccatatatgtaacagaatcaagaaacaaattttaattaaacaatctgtaacagaatcaagaaacaaataaattttaattaaacaatctatatggaacaaacattcccaaattctaagaataaatttttctttaagtttaaaacaaacaaacaaaaaaacaaaaaaaaaacaatttgcttttctgattttgtttagattactgttttccaagttattgcaagtggatgaagtatactggttaacagaacttactttttctaagtcagatgagccttaaattgtgactttctttaagaagatagctcacaatagacttctagattatgtactttgaagattgtgacagggaatccccgtgttgagggccatattacaggccgagagtcagagactcataggatctcagggatggacttccccaactaacaccctgcacagttcctgggccttaataaataactggtgaaggcatgcaaacagaaacaggtagatggatggattgacagatcgatgaagagatggatgaacagatggctgagtttcctcaacttccaccctccaagtatcaaaatgggatcttttactcttgaaggcaatgagattagtatcttgtgtgttagcctggaccagttcagtcagctgtaactgttagaaagttcttccttacattaagcctaagtctgccagtggcttataatgtctgaggtcccagttttgttttgagacacaatgcagaataaatatttatctcactcccacatgatagtcctttagttatttaaaaacagttgccagatagacttatattttctattttgtttcaaccattcatctaattgcttatctaccttatgagattatttcaagtattaagttagatgtctattcaatgcctggcatatagtaagcagtcagtaaatagtagatattatcattgttataaagcctttgattccaaactcccccaatattatattttaaaatgtcctgtctccaagagattttgcatgagactttttaaaaatgaaataagccagcctgagctaaataggagcatacagaccacaactggggacaaaaaacatgtgtcaagtgctgggagcttactcatttggatcagaacaggattacccaaagggaagaaagaaaaggacccataaaatcagcattcgctacagtatcttgggcaaggcatagctatgagcagcaagttttaataagcttgcataataaactttggagccctttaggaagtccattccagatgggaagctcaatcacaatgaccttgatggtattctggtcccagacatgtctctggacatgctcttgtttgtatcatgtacacacaatgcccccttgcaaaaagacccaaccagaccagaatacgaaacttcctatgtggcccaaccatttcctgtggcagaaatcactagctattcacccaaatccccttccctgtcttctttttaggcacatggctgattacatttcccagtctttgtaattaggtatggccatatggaatttttatctgatgaaatgtgagaggatgttgatgtattccacttgtagatttttaagataaaagatatgcttcctctccaacatgccttctgtcctctgataccagttggtatagtttataacccaaggtcaagggtttcatagactctcaagagggaaggaagctggatacttgagtcactatgtagaaaagagctgcccagtggtcagtaaatcaaaattgcactgttacttaagcaaaaataaacttccgttgtgcttgacattttgaagtaggttcaaaaatctaaaatatgtggcactggcttaggagtctggtgatgagcagcagagaaagacactggaggcaggaaagaaggagatccatgtcaagcagttgcaaaatctatgatagacctgtcacattctctaacatggaagccaacaaagtacttacagaatgtccagctgtaaggaaagaatctgaacaagagccagaaagatgggtttcatatatataactaataagagatatgagctctggcattcaagagtaggaatgaaagggaagagaacacgcccagaagttagagagtttacctcattcgaaaagtaaattgctcctgagccagaacaagcaggagatgaggcttctgccatcctgctccagcctgttgtttgagatgtcctcagtgtagcctctaccaacttgcaaaagagaggcgtgaacccagttctgagaactatgtccagcatagaagtttggatgtgattctgagcatgggaggttgactagaagtaaacaggccagaaatttttgagagaattatacagttagaaaggccactgactgtatgaatcctaaaatgactccaggtctctacacttgcatgagcagaaaaaaaaaaaagctatgaaagttggacagcacccaaaggatgcacacaccgccatgcccacggcagagggggtgtgaaggataatgaatgcagaggagcatcttacaaagtaaagtcaggggccatggaggtcaatggacaaagggctcttcccttggagaaaaatcaaggtctagtcagggaaattccttcaggacaggggcaggggctcttgtccaggccagctgagcaggattcatcattgccagagacccaggactgccatgttctgccaattctccttgccactcatagaagtcactattctgcttgccttgtcctgctcatctctatacactgccagtgtgtgtgaaagtggggagaagaggtgacttgttatcagccccaacataatcatatccagacatgtggcaaggactgtccatcacccaaaggtgctggccttgggtctagattcagtaactagaggggactttgggttatctctccaggagaaggggaggggcttatatgcaggacgaggaatgctggaggataatcggtggccacaggagtaggcagataccccagcctgggcttccctggctaatacatggtcactctactttgaaactgcatgcatttgtaaatcttcctgggcaaagatataaaactccccatgtggtctgaccagagtcctgaacttgcaatttctactattatgggagctcagtgaaactgaagatgctcacaagcttcccttcttctacttagaggtgacttcttccagccatggaaatgacaaaactactcccccaattacttccatgtcccaccctaagtacctgggacacagacatgtacagatcagaaacctcctggatccctcaacctgcatggtccctccctcctttgccagaacttactgtcggggccactcttttagtacctgttatatgctctgcctcacatacttgtttttatttcttaataataaaatttgtgagtaaattccatgaacaagaacagtttcttacatgtatcctccacggaactgcccaatcataaataatcaataaatgtctgtttattaactgggtggccaatttacatagtaagtaaatattaattccttttattttgtaaacacttcttgagcatttgtgatgtgccaggcactggggtaagagccctctttgccaccaagccactcatgctcttgtggggaaaatagacacataaagaagcactaggtcaaagacaagttgagacagagacaagtgtgggacactgtggtgtcatggggaagggtacctggcctgggcctgggggcgttggaattgaaagcttcttggaggcaggaggacaacaatgattcgaacccaagcctccactcgtatccaattgtcttttcaatgggaactcaaattttaaaagagataatccttattacctgcctaatttattttttagaagtggagatgtataacctgggtgagctgagctgcagggcaggctgcgtccctagcaattggcatgggctttatcagagtggcactacactttgggggtgttgtcacacccttctgacagctgattccatttctgttacaaccggcccaagtgtctcagggctggttgggaaagtgtctgagtgtttatcacaggggctgtggttggcagaagccttcagagtaacacaacgactaagaacacacccttcaatgtcgggctctataaaacttactgcctatgtgacttaaacttaactgctctatgctcagtttcttcacctttaaaataaggatgataacagtgtggggaaagatcaaatgagataatttgaagctttctgtgtctggcttccttcactcggcaaatacttttgagacatatccatgttgttgcatgtacaagtcattcattcctttttattgctgagtagtattccagtgtatgaatatatcaaaaattatttattttcttacctgttgatggacacttgggttatttcctgtttgaagctattatcagtaaagctactataaacacatacaggcatttgtgtggacatgctttttttattttccttttctgtcatatggcaagtgtatacttaattaaataagaaactgtcaaagtgttttccaaagagcctggcccattctgcattccaatcagtaatgtatgagtgattcggtagctgcacatcctcatcaatacttggtataatttagccattctagtgtgtttgtagtggatcttattatggttttaatttgcatttctttttcttttctttttttttttttttttttttttgagacagtctcactctgtcacccaggctagagtgcagtggcacaatctcggctcaccacaacctccacctcctgggttcaagtgactctcctgccttagcctcccaagtagctgggactacaggcatgcgccaccatgcccgactaatttttgtatttttagtagagacagggtttcactatgttggccaggctggtctccaactcctgacctcatgacccgcctgccttagcctcccaaagtgctgggattacaggcatgagccactgcacccaatttctaagcaacttttgactcttttagaaaaattacatccaccttaaacgattaaaaacatatgaagatatttgagggcttatgccaagattgtgatggaaattcccaaagatgattctagttatgctcagcaaagtccacatagtgaaaacccacagacagccttccaacaagctactttgaaggactttgttgtctctcctgaagagacaacattcatctgagcatggtgttttgaactaattgtttttaaaactcaatcctgttacctcatagcagactctttggcaatagaaaatggtaattaatagagtctggggtcagtttgccttggttcatagcacttactaattcttcaacctcagtttcctcgtctattcagattaaatgagttactatacatgaaggactcagaaaatacctggcacatactaagtactcaacacaagttttcatcatatgtcttcagcaacttttttgctctttgtcattaacactttttgtcccattatactcttaacaattctgaactcctcagcttattctggttctagagcttaatgaaatttgagcaagaatcctgtagttattcaatccactggattaggtactccaagcttatagcatggagaaatgtgtaaacctttcactgcatagatagggtatgaaatacatttggaaatggggaggwcaagccaagatggccgaataggaacagctctggtctacagctcccagcataagcgacgcagaagaagggtgatttctgcacttccatctgaggtactgggttcatctcactagggagtgccagacagtgggcgcaggacagtgggtgcagctcaccgtgcacaagccgaagcagggcgaggcattgcctcactcgggatgcccaaggggtcagggagttcccttacctagtcaaagaaaggggtgacagacggcccctggaaaatcgggtcactcccaccctaatactgcgctgttcccatgggcttaaaaaaacagtgcaccaggagattatatcccacacctggctcggagggtcctacgcccatggagtcttgctgattgctagcacagcagtctgagatcaaactgcaaggccgcagcgaagctaggggaggggcgcccgccattgcccaggctggcttagg

SEQ ID NO: 94308 - DNA, 13032 bp, Homo sapiens
aaataaattaatcaaggtaagtgttatgacatttccaatctactgaacaggaaaaacaataagcagagaagtcagactttttataattcgatggaaaaacatacttgattgctgtgcatgtttttacttacctaattttttagtaaaataaatttttatgtcaattggttctttgtattttgtgaattgcctattaatgtcctttcccatgtgtgtgttaatttttcctatacttttctctgatgtttaatttttttatccgagtaagaaatatatctaatttcaaaagcccaatagtactctaatgactgtaagaaaaatatcaatccctgttttactcttcctttcccaactccattttcacttcctagaggcaaccctttcagcatttttagctgtttctttttttttcttttcttttcttttcttttttttgagacagagttcgctctgtcgcccaggctggagtgtagtggtgcgatctcagctcactgcaacctccgccttccgggttcaagtgattctcccgcctcagtctcccaagtagctgggattacaggctcctgccaccacgcgtaattttttgtatttttagtagagatggggtttcaccatgttggccaggctggtctcgaactcctgacatcaggtgatccacctgcctcggcctcccaaagtgctgggattacaggcataagccaccatgcctggccatttttagctgtttcttctgaaatttatctccatatttctaactaatattctttaatttccatttcttgcttattttaaatattatatgctgacttctgatgaagcataagaatttagtactcttataaaacatcacacaccttacctacatacaagaactcttctagtacagttgtatcccaattcttgattaaattgaaatctaatacttatattgttatgactatataaacactgaggactatgctctgactttttttatcttgcccaaattcctatctaaggggtctggggagtcatgccctacaaaccataaattctcatcagtggggtttatttaactccatatatataccatgacttactttccaacctgactctggcataacattaggagacaagaaagaaaataaaaatattttaccccaaaacatgtttctttgccatatctcaaaatggccctacaaagctgtccttcctgagggaaaatctgcatctgtaaagaatctccgtgggcacagtggctcatgcctatgatcccagccctgtgggaggtggaggcgggtggatcacctgaggtcaggaatttgagaccagcctggccaacatggtgaaagcccgtctctactaaaaatacaaaaattagccaggcatagtggtgcatgtctgtaatcccagctactcaggaggctgaggcaagaggatcacttgaacccagaaggtggaggttgcagtgagccaagatcaagccattgcactctagcctgggcgacagcagcgaaactgtgtctaaaaaaaaaaaaaaaaaaaaaaaagaaagaaaagaaaaaaatagcaccttttaaagatctggataggaaacatttgccatctattgtctctaagggcagccactataagacttcaaaagaaccttagtctccaaagtcttatcttaacctggacatttcctttctacggatcccaggtctttaacaaactcagccaattgtcaaccagaaaatgtttaaatttaactatagcctggacacccccactccagctttgagttgtcccgcctttctggaccaaaccaacgtatttattgaatgtatttgattgatgtctcatgcctccctaaaatgtgtaaaaccaagctgctctccaaccaccttgggcacatgttctcagggtctcctgagggctgtcacaggccatggtcactcatatttggctcagaataaatctcttcaaatattgtacagtttgactctttttgttgacagtaccattcactgatgagctacgtaatatagtatggttctatttccctttcttgtacaacatttgttttttccaggagttaaaaattatctcattttttcatttgcttcattttctaggtactcttacaaatgtttcctaaactctctgatagagctgaagaactcctcttaatgtggtggaactcatcgggtccactgatcccacatgtttgtttccctgggccacatcgccccagcagcttttttttttttgagacagagtcttgctctgtcccaggccagagctcagtagcgcaatcttggctcactgcaagctccgcctcccaggttcaggcgattcacctgcctcagccttccaagtagctgggattacaggtgcgtgccaccacgcctggctaatttttttgtatttttagtagaaacagggtttcaccatgttggccaggccggtctcgaactcctgacctcgtgatccgccagcctcagcctcccaaaatgctgggattacaggcgtgagccactgtgcccagccttccccaacagctttccatcctactgcccagccttgcctggtcctcaggcccattgcacaacttccatactggaaattcactcaaccatcatcctgtgaattctcttctctcccgtattggcttccttgttttccaaatcccttaggttccttaggttcttaggctcatttcctaattttaatgttgcatatccttcaattgcttcatgagggaagtagacataagatcctgaaacttttcatgtctgtaaatgtctttgttttaccctcaccattgactaagctggatacagaattctgtcttagaaatcaatttccctcagaattataaaggcttggcttcattttcatctggcttaagttactgttgatacattcaatgccatgctgacttctcattctctgtatgcaatcttttattctctctggaagcttttagaatcttgtatcagtcagtgtactacaaaataaaaagaagtcattttatgtattctgtcatcttctttcttttaagagacaggatcttactactttgcccaagctggtcttgaactcctggactcacatgatcctcctgcctcagcctcctaagtagctaggactacaggtgttcaacaccatactgtgcctacattctgtggataaggaaattaatataaaattaggatctttcatgactattggaagagctgaaggagtaaaggtcactggatctgtcaccaaaaatcagagaaatctatgctaaacatctcagtctgaatcattgaggagaggtggttctcaaaaccttaccgaaattctcaggaatctctgagaagcttccaccaactatcctctcaagagtttgccaggaagccactgtgaagctcttgcctacctgcacatttagctgcccctgattcacttccatcttccaaatctcatacaagtttctctcacaagcatactctaaccaaaaaccacatagaaaaggaaaccattctggaaaatgtagctctcagccttaaaaatgagtgagagttgtgctaacaccagataatccagcagagtctactccttcatcagctcggcatccacacaccctatttttaatctttaacttccaaataaagatattagcaacattatgcttttacattatatgattcaatgattcttcatacaaccaaacctaaaagaagaaacccagagttccactttatccatctgtgaataaatgtttatcttctgattcacaatcttatcttgctatcctataacttaaaactggaccatacgagtaaccatgattcatatactgatactattagagggtattgaaatgggagagaaaaaaaagaaaaatatcagtttatgtatacaaatgtccatatctaagcaataaagaaaatatctctaatgactagagtacttgtttctggaactggtcacatggctgtaattggtatgtgtaattcccttctcccaccactcatttcctatcacactggtccccagcaagcacctcagccagttttttttgttttttttttgtttgttttttgttttttgagacagagccttgctctgtcacccaggctggagtgcagtggcgtgatctcggctcactgcaacctctgcctcctgggttcaagtgattctccttcctcagcttctggagtagctgggattacaggtgcccaccaccatgcctggataattttttttgtatttttagtagagacggggtttcatcatgttggccaggctggtttggaacccctgatctcaagtgatccgcccaccttggcctcccaaagtgctaggattacaggtgtgagccacagtgcccagcccagtcagttttttaatttgttttttggtctagtatgatgacctaaatctttattcttgaagtttctgtgcgacattgttctgcttgttctggttgctatagttttctctaacttttactacagagcatgggagtgccagattaccaggaggatctcctggagcccaggtactccttgcctccattgtgcagtagccaaccaatttacccttgataatcaagatcagttgtcccatctagcaaagaaaacatttgtctgacaaagtgaccagatgagagtctcagattcctgttaaatggactcactgttgtgttccctggtggaagtattcctgccctggaaacccagacctctaaactagcagagtttaatgttgtggggataaaaaagccaaaactttggtagatcattagatgtacagtaaaagacactactcccatttgcattccttgatttttaaaacttcgtatctttgctgtgggggaaactacatcataaatgagtcactgattcggagtatgttctgcatctcatcgggtactaaatcagctccacaaagttattttatcaactggcaccataactgaatcttcaaaagcccattctgccactctatcaagccaagcttcaggatgatggcaaacatggtaagaccagtgaattccaaataaaggcattcacaacatcatgctttcgtgagcacattgctgcacttcatttgctgtgaaatcagttccttgtcagaagcaaagctaggaagagtgccactatcatacattaggtattctgtaagtaagtccagagatgaccattttggaggaaccactgtggacagggagggcaatccatccatctccagtgagaacaaagcagtgcttctggcaagatggaaatggtccacgttacttaaactgttgattcccccaaataacagtgccacatcatgggctcaatgtttgtctctgctgttggcaggctgggcaccctgcaggagccatttgcaaatcagactttcaccgagcctaagctcagctccatccctgccaccttgggaacagaattctgggaagtatagttcccaacctcagaagaacggtggtgtcatcaggttgacaagaggcaatccagcacagatgttctccttgcctctcagtgttctgaaaggtcattccgatgtgctgggcctttctgcatcactgcaatgggcactcaggaagccctttctgtacaaaagcacatgttctcaagttcgtgtagatttttattattttagtttcttctcctttgtttactctgttctctctggaattcctaatatcatgcacctctgagttgattctctaattttcttatcttttcccttcccttctctccttctgtcctccacactgccttttttgttctttctgggatatgttattgactttatcttccaaagtatctgcttatttatttgaagatttttaaagctttttatttttaaataattatagattcacaggaaatattatttcaaaattcaaaaaaaggtactgggatgtctcatgcaccgcccccccagactccctcactgttaacatcctgaacgactatagcataatatcgaaaatgaaaaattgaaattggtggtggcggcagcacggtggcaggggcagcaaggcggctgcagcagctgtagaagaggtcagctcagccggccagtttgaggagctgctgcgcctcaaagccaagtccctccttgtggtccacaatgtgcacagatgaacgaagttatggcagagttagctaaagaacaccctcaagtttcatttgtgaagttggaagctgaaggtgttcctgaagtatctgaaaaatatgaaattggctctgttcccacttttctgtttttcaataattctcagaaaattgaccgattagatggtgcacacatcccagagttgaccaaaaaagctcagcgacatctagtggctccttcccacccagcactgatgaacatcttaaagaccaaaaaagctcagcgacatgcatctagtggctccttcccacccagcactgaygaacatcttaaagaagatctcaaccttcgcttacagaaactgactcatgctgccccctgcatgctgtttatgaaaggaactcctcaagaaccactctgtggtttcagcaagcagatggtggaaattgttcacaaacataatatttagtttagcagttttgatgtctttagatcaagaggttcgacaggggctcaaagcctattccaattggcctacctatcctcagctctacgtttctggagagctcataggaggacttgatataattaaggagatacacgcatctgaagaactagatataatttgtcccaaagctcccaaattagaggaaaggctcaaagtgctgacaaatgaagcttctatgatgctctttatgaaaggaaacaaacaggaagcaaaatgtggattcagcaaacaaattctggaaatactaaatagtactggtggtgaatatgaaacattcgatatattggaggatgaaggagatcggcaaggattaaaagcttactcaaattggccaacataccctcagctgtatgtgaaaggggagctggtgggaggattggatattgtgaaagagctgaaagaaaatggtgaattgctgcctatactgagaggagaaaattaataaatcttaaacttggtgcccaactattgcaagaaatacttaattacattgggagcagttcatgatttagtcctcagaaatgggctaggaatagaaaaatcctgcttactcagttacatgttttttgtatttcacaatgtcgtgctaaataaaagtatgttacatgttttcccactaaaaatagaatgcaataaacatcttcaaattattaacaataactgtataaaaaagtgtatctttacagcaatattaaacatacagctactagaaaaaaactgaaattggtacaatctacagagctcattcagatttcacaagttacacatgcccgtgtgtgtttgtgtgtgtgtttggcgtaactttttgcaattttatcacttgtgttgtcttggatagccaccatcacaatcaagatacacaacagtaccacagccgtaagagtcccgcatgttaccactttatgaacatacctattccctcttcccccattcctaatccctcacaaccagtaatctgttctccatttcaaaaatgatgtttcatcaatgttgcatagatgaaatcacgcaacatgcttaagattggctttttttcactcagcataatttcttctaagctatgtgtgtgttgtttttctgtttttactgttagtagtatttccacagtataaatgtactacaatttgtttaatcattcactcattacagaacatttgggttgtttccagtttggaactattataaataaaactgctatgaacatttgcatatctatttatttatcttagtctctactctattatttatttctaaaagttctttcttgttctctcattgtttcttttctatagcaccttcttcttgttttataggtttaatatctttccttatctttgcagattttaattttaaaacaaatgttttcttttttttttttttttttggagacaggatctcgctctgctgcctaggctggagtgcagtggcttgattgcggctcactgcaactccgcctcctgggttcaagtgatcctcctacctcagcctccctatcagctgggactacagatgcatgccaccacacctagctaatttttgtattttttagtagagatggggtttcaccaggttggccaggctggtcttgaactcctgacctcaggtgatcacccatcttggcctcccaaagtgctgggattacaggcgtgagccaccgcacccggcttttaaaacaaatgttttcttctattcgttgcattgtctctgttacctatgagttcctctgcttctgattaagagtctgttcttcatgtgaacactttcctcaaatatctgatgaatcttgcttatgcatttatatttaagagtgaggcactatagagtttattcctcaccagtgaggctagcttcactggtgaggaaattgggcagtttagtagtcagggtaaattaggctatgttgtgttaacaaacaacccccaaatctcagtggcttagcataataagggtttatttctcactaatgtcacagtccaacgtggcctccacagaggtggaagaaagagcatgaatgattgtttaaagcctgagacaccagctcattcactatggaatctctcagagcagaaagccccagtagaaattattaatatggataaatcaaaaaatcacagcaaacacatgtcatcattggaagctatggaaataactatgagaagacataacccaaaaacatttaaagtatttatgtctgtggagctgtgaatactggcagggaagattggggcctttctgtactgatagatatttcttaaatccttgattatatgttaattttattaaaggaatacataaatttgaaattaaaaacaaggataagatgagcatccacctgagttgcccatgtctgaggaaatgcactgttgaagatgtcatccactgtatcaggaaatcaatatttcctatccaaatcaccaaatgctaaatccctcctaccgagtcctgtattagtctgttctcacactgctgtaaaaaactgcccaacactgggtaattggaaaggaaagaggtttatttggctcacagttctgcatggaggcctcaggaaacttacagttatggcacaaggagaagcaaatatgtccttcttcacatggcatcaggagagaaaagtgccagcagaagaaatgccagacatgtacaaaaccaaagatctcatgagactcactcactatcataagaacagcacgggggaactgcccccacgatctaatcacctcccatgaggtctctcccccaacacgtggggattccaattccaattccaattcaagatgagatttgggtggggtcacagagccagaccatatcaagtcctaaggaaatttgtttttgaagaatgggcatgttgttttttgtcacatgatgaaaactttgttccacagtgtattttctttttgccttgttaacaaactgacatgttaaatgagcattcagtcatgagaaacagcttctctcaggtgcctggtaacatttcctgcctcagcttttctctatgctttcactcatgtgttccttagttgttttaccttatacggttaaattgcacagcctgttgcactatttgtctttaggaattggctatgtgttctggatgttaatcttttatctgttacatatgatgcaaatattttctccaagtttattgtcttttaactttaaggcacaagaaagtagatgaaataaactgcctaagatcacagagctactcagggacagagccaggactcgatcttgtcaaatgctctttgatttatactccattttcctactgcaaagtattcacatataaattatcttattaaaaaacccacaggatttgcattctatcataaagacacatgcacttgtctgtttactgcagcactattcataacagcaaagacctggaatcaacctaatgcccatcaacagtagactggataaagaaaatgtagtatatatataccatggaatactatgcagccataaaaaagaatgagacaatgtcctttacaggaacatggatggaactggaggccattatccttagaaaactaacacagcaacaggaaaccaaatattgtatgttcttacttacaagtgggagctaaatgatgagaacacatggactgaaagaggggaacaacagacattggagcctacttgagggaggaaaatgggagatgggagaggctcagggaaaaaaaaaaactgtcgggcattatgcttagtacctgggtgacaaaatatctgtacaccaaacccccgagtcacgagttaacctgtgtaacaaacctgcacatgtaccctgaacttttaaaataaaagttaaaacattaaacacacacgcacagatttggagtcagacaatctaggtttattccagttccaacacttactgctctgtgatcttgagcaagatgatttacctctaatgaaacttcataggctcctcttcaaatgggaataatgataatagcaattttctctagttgttatgaaaaaaaacaccaggtatgagaaataacatatacattataaagtgttgaacaaatggttttttattttaaaaaaaaactttattaaagagatagtttggggcattttttctttacattattttaaaatgacaatatccttctatgttagaaatacaacaattttggaaatcatttctaaatatctttagcaccccactattcttaatgtcatgttacatgaaatttacataatctagtttagaatcagcattactgggaaaaagacaatgttcctatataaattctactacatataatatatatatgctactgtttatgagaagggtcaataggataaagaaactttcaaaaaattatatacacatacacaaatacacaagaacattttatattcattattcaataatccttagaatgatgacaatgcttatatgtaaaaaataatttcactctagagcagattacaagtaaatttatctgccacatacgagaatctatttacttatgttatagcaacatctcttttctaaaataaaaacatggcaaatactcagcttgatcatctgcactatacaacagaatttactcggaatgaccttttgatcatttgcaaaaaattcaatttaatgttaatggatgaagatattatatcactgttggcaatatttataaaaatgtgcttatggctctggaagcaattcctaaaaagaggtagtaaatgttctgagacttcagaattgttagaaaaagttaagcttcagttggcgtttactgcatataagtatgttgacatatgttttcctgagcaaatggcttattctagatatatacgttggtatattcattgaaaattagatttattatgttataaaatgtgactaaaagcccatttaaagggcacatatctctcatcttttggttctaacgtgaagccaaatgaggacaggcgcatgattcagtttatacaataagaaaattgccccaaagtggatgaagcacacacatcagcagctcagccccactccgtacaatccaagtgcattcaacaagtgatatggtttggctgtgtccccacccaaatctcatcttgaattgtaactcccatgattcccacatgtctgtgggaggaacccggtgggaggtgatttaattatgggggtgggtctttcctgtgctgttctcctaatagtgaatgagtctcatgagatctgatggttttaaaaatgggggtttctctgcagaagctctctttttgcctcctgccatccacatacgatgtgacttgctcctctttgtcttccactatgattgtgaggcctcctcagccatgtggaattgtaagttcaataaacctctttgttttgtaaattgcccagtcttgggtatgtcttcatcagcagcatgaaaatggactaatacaacaagtaaatcactgaacatttaatcccagcagttctcttttttcaaacttctcccgttgattttgtgtcagccctgcctgtgctatgctttgttggggtaagcaagccctgcataaatgttctttccttagagtgaaaaaaatatgctataataagaaaggagagatggagaagacaaaataggaatacaaaaaaaggcttcgtgtagagttgacctgtgtttcactcactggataacatcacagcatatagatgttggtcatgaagcaaatatgctttagttgcatacagcttagaaacctacattatttaataccttcatcagaggagtattaaactctagcttgaatgtcaacacaacaaaagttaggacatgttgtataactgaagtttttcccaatgtactaagatctaatcttgagcctgtctgcaagcataaagctaaataacgcatcccattaatcaataaaatgctcactggtgtctttatcaaaagttgtattttccttcattgattgagtcacatgaagtgaaacttgttctgcttaactaagatggtgctgctgtaccttttaaagaaaacgaattaaaggttttatgttcatgaaagcacaaatgtgacaaaataaactatgctgacaccgtcaacatcatgacatcatagatacgcccaaaggatcacagggataagtatttttgaagcccaaaggcctacatataaatttcctgctaaatatctattctacttactagtccaaaaacacaatgtcagattttctaagagaaaatgataaagaatatactttgatatcctctctcctttaagattttaaaataacaacgtgtttatggggtagtttctgcccaggcacatagattcctgtttacggccaagtttctagtatggtggtaataagcaagctttaactaccatacaaacagaagaaatcattccatcacaaaatctcgatttcaaactttaaatcaaaaccagagtattgaaattgacaatatttacaattcatcatttttcaaatag

SEQ ID NO: 94309 - DNA, 261426 bp, Homo sapiens
  misc_feature (1)...(261426): n = A,T,C or G
caggcgggaattgaacaatgagaacacatggacacaggaaggggaacatcacacaccggggcctgttgtggggtggggggaggggggagggagagcattaggagatatacctaatgctaaatgacgagttaatgggtgcagcacaccaacatggcacatgtatacatatgtaactaacctgcacattgtgcacatgtaccctaaaacttagtataattaaaaaaaaaaagaaactgttggatatgtaaaccacaaatacatacaaggatacttattgcagcactgtttgtaatgaaaaactggagacaacccaatatctatcaagagtagcatggataagtaagtgatgatataatcaagagaatactacacagatatgaaaatgaataacttatagttttacatatcagtgtggatacattgcaaaaataatgttgaatgaaaataactcacaacagactatacacagtatgattttatttatataagtttaaaactaaacattatttggagacatacacgtatatatgtaccatatgtatatatatatatatatatatatatatatttggaggtacatagctatatatatatttggagatacattggtatatataaataaatgtaaagaaaatacaggaaacagttgacacagagttcaggaaaatcactacttctggtaggaagaggcaggggtgttatcagaaagggttatacaggaggcttcaaggatactggtagtgtgtgattccaaagctgtgaatgtgggctggtattcagtcaagtttgcatgtatatcatatactcttctgtatatataagttatttgataattttaaatgttaaagaaaaataaagaatgagaaggcaagaaaaaaatgaaaatgttaacacaaccgaccacgcaatttcaattctgtcctaaagacatacccacacataaatgaaatgactataaagtatgaggttattattgcaacattatttgaaataacaagagattggaaataacataaatatttataaatttggaacaatggtacattcaacatagtgaagtagggtacggtcgtaaagtatatgaaaaaattcttccattgatatggtgtgatcctcagtgtgtgttcagtgaaaaattcatggtgaataataacgagattaacagccttttattttaaaaaagaaaaaatatataatatagtgctattaaataatagtacaacagtaatatacacatataagtggcctttatttataaaaaaaaaattaaaagaataacttagaaaccaataaaaatgactacctagtcaactctggacacatgacctacgagttagccctgctctgcaaggagcagttttttgtaataaaagataaaaacaaacaagcaaaaaaatgattacttacgggagaggggcagaatcgaaaagaagagattagagacaaccttctctaagtatatgttttcatatagttttaatttttaaaccatgcaaagatttttacatactcaaataataaacttaaaccctattgaaaaaaaaaatgaagcaaatcctggaattgaaaacaaactaaagtaaataaaactagtaatattgtaaataaccatccaaaggaaagagctccttctagactttgaagttagtactttatgcatgcttggtggcatacttctgcagagcaatcttaaatttcatttagcagttctattgctagtaaaaatcttagtatgttattttgaagcagtctctatttccctctctttcagagataattttatctctcagagagactccgtctcaaaaaaaaaaaaaagcaagcaagaaaaaagatcaagttatcaatagttagaaaatgacactgaaaacagacctatctcacattcctgtgacagaaccatctcactctgaatccattgtcggaagctttgctaggttatttggacaactgagagattctgagcttcctggagactgtccctctcgctagcaagaatacaccaaaaaagatggccctctgaagatagcttttaaacggttcagaatcaaagccctcacagggatttagcaatgacaggttctgaaactcaattacttgcaggggtttaaaaggttgaagaatctcttcttcaatgcaaaatttcttccacaccaaagaagttaaacctcacctttgaagggcctcaactttaagaatcataataatcagtgattctgggcttaatcagtctttgttgagtaattggatttcttttttttttttttttaaagtctcaagctcaagtggccaaggcaagacgggtcaaagtcagagtggtggtcacagtcctggaggtggcaagaaggatgacaaggacaagaaaaagaaatatgaacctcctgtaccaactggagtggggaaaaagaagaaaacaaaaggatcagatgttgccagcaaactgccactggtgacacctcacactcagtgcccattacaattactgaagttagagagaattaaggactatcttctcatggaggaagaattcaaaaggaatcgggaacaaatggaaccattagaagaaaagcaagaggaggaaagatcaaaggtggacgatctgaggggaccccgatgtcagtaggaaccttggaagagatcaatgacagtcatgccatcgtgtctacatctgtgggctcaggacactacgccaacattctttcatttgtagacaaggatctgctggmaactggctgctcagtcctgctcaatcacaaggtgcatgccatgagaggggtgctgatggatgacgtggatcccctggtcacagtgatgaaggtggaaaaggtcccccaggagacctatgccaatactgggaggttggataatcaaattcaggaaattaaggaatctgtggagcttcctctcacccatgctgaacattatgaagagatgggtataaagcctcctaagggggtcattctctatggtccacctggcatagttaaaaccttgctagccaaagcggtagcaaaccaaacctcagccactttcttgaaagtggttggctctgaacttattcagaagtacctaggtgatgggcccaaacttgtacgggaattgtttcaagttgctggagaacatgcaccatccatcgtgtttactgatgaaactgacgccattgggacaaaaagatatgactcaaattctggtggtgagagagaaattcagcgaacaatgttggaactgttgaaccagttggatggatttgattctaggggagatgtgaaagatatcatgaccacaaactgaagagaaactttggatccagcacttatcagaccaggccgcactggcaggaagatcaagttccccctgcctgatgaaaagactaagaagtgcatctttcagattcacacaagcaggatgatgctggcagatgatgtaaccctggatgacttgatcgtggctaaagatgacctctctgatgctgacatcaaggcaaatctgtacagaagctggtctgatggccttaagagaacgtagaatgaaagcaacaaatgaagacttcaaaaaatctaaagaaaatgttctttataagaaacaggaaggcacccctgaggggctgtctctctagtgaaccacagctgccatcaggaaaatggttgggagatttctcaatccctgaaagggatgaggttgggggatttgcccagaggaatccctgttcccagtgatttttattagaaaaacatcctgtgtcttttggagtacaatgtgtaagtgcccattgggtggccttcgtctgttggtcactgtgcagcagtctgcttcccagtaaagtgtgctctttctcacacacacacacacacacacacacacacacacacacacacaaagaatctcgctctgttgcccaggctggagtgcagtggcacaatcttggctcactgcaatctctgcctcccaggttcaagcgattctctgcctcagcctccagagtagctggtattacagacgtgcgccaccacacccagctaatttttgtatttttagcagagatggggttttgccatgttggccaggctggtctcagactcctaacctcaagtgatccacccgcttcagcctcccaaagtgctgggattacaggtgtaagccaccacaccagccagacttcttaaaaataatattttctgtacaaagcaagagtaagaaggtggtcaggagacttatcagattgaaatgatctccatgaagtcccagaaaggtaaaggagacttctcacttcccactcagctctcaggcccatgaaaaccacccatccacatcatacatactgcaaggtgacctgaattccaaagtcctgactgcttctcaccttttatcctccccaggaactgtagttaataacattcaccctgtattagtccgttttcacactgctataaagaattgcccaagactggataatttataaagaaaagaggcttaaattccacatgtcttgggaagccaacttccttgggaaggaaacttacagtcatggcagaagggggagcagactcatcttacatggtggcaggcaagagagactgtgtgacagcacgagaaaaactaccattataaaaccatcagatctcgtgagaattcactcattatcacgtgaacagcatgggggaaactactcccatcattcaattacttttctcccttgacatctgaggattacaattcaaaatgagatttggccgggcacagtggctcacgcctgcaatcccagcactttgggaggccgaggtgggtggatcacctgaggtcaggagttcaagaccagcctggccaacatggcaaaaccccatctgtagagaaaatacaaaaattagctgggtgtggtggcaggtgcctgtaatcctagctactttggaggctgaggcaggagaatctcttgaacctgggaggcggaggttgcagtgagcagagatcgcaccagtgcactccagcttaggcaacagcatgagactccatctcaaaaaaaagaaaaaagacaaaatgagatttggatagggacacaaagcctaaccatatcacaccccattggccacccacccacctcctcctcctagaagctcttccctccctgtgagttggcaggtgaacttctgttgttcctttctggccacatctcccacctcctttactcactctactctcttcctctggaaactaaacataggcatttcacaaggctctcctctcttccttaaaaaactcactcattttacaccttcaactctctccttcatacagatgattctgttttatcagctcacccctcacttcactcttgagtcccagactcaaatttccaactacctgctggaaatctgcacttcattggcccatggctgttttaaactccatctgctcaaaaccgaaagcaagacaaccccctgaaaacctacttcttctgcactttccactcttctgttccttcatgtgagaaaatatccacacgaagtacagcacatattctcgtctctgagtgtaccatcctccctgcacccctgcactcaactagaaatttccattctccttagctgttttctagtgcccatactactgattctgaactcaggggattatctgcaaacacaagttccaaggccccatctgcaggtttgaaaaccactgctcttgacacaacattttctaggtgaaatcagaccaagggaatgcttgtaccacatcagacagtcccctgttaaaactgttttcacggggctgtgatttgttgcgatacccttggctgcttaaaggctgctacaaaaaggcatatgattaaaattgctgttgtactcatgccagaggcgtagctgagcatgttaacattacatcacagagggggccttttatgaggcagggtccctgactgatgagcaaaccaccagaggagggtcaggcgagaggcccagtggagggtaacacacatggagttcagtgacccctttgttccttgaggagagaggacctatttctacctaaggacattcccggaaggcaatgggtttcaaacaatatcctgaagagactcatctcggggaactaagcaggtaggaatggaaaggaggaaatgggaggggagaggaagtcaatctgggaccctcatcccggcttcaaccaaaagcttcactctcatctgcctgatggatggagctacaatgtttttgaacaagagattccatttgaacaaagagctctgggttctgtaactttaagagtttgggtggtttttttttcttttcatttgtttgtttgttttttgccacatcagattttatagagaatttaagagttttaaaactacaattaggccgggtatggtggctcaggcctgtaatcccagcactttgggaggccaaggcgggctgaggtcaggagttcgagaccagcatggccaacatggtaaaaccccgtctctactaaaaaaaattacaaaaattagccaggtgtggtggtgcgcgcctgtaattccagttactctggaggctgaggaataagaatcgcttgaatcctggaggcagagcctgcagtgagtcgagatggcaccactgcactccagcctgggtgacagtgagacactgtcgtaaaataaataaaataaaactacaaatatagaggagcagasagtggcaaagcagattgaggacagacttcagaaggccttgaactctaatgtaaagcattcagattttcacctcaggccagtggggactcgccaaaagcttttgtggaaggaacagaatggtgaaagcaatgctgaacagagcctaacttggttacagtgttcaggatggagaccagagttggaagataaaacagaggcaccaactgccaggtgttttctacaataagggcctcaatcaggtttttttaaggaaaagatgcattccatgaagtcaaatatccaagaagaggtatacattgcacacaatactttatttgatccttttctacattccccaggggtgtattcctgtcaccattggagatgaggaaataaggccctgaggctcaagtcatttgtccaagattacatagtgagcaaatgactaaactgtaattcaatgccaagtctgttttttgttttttatttgagacagagtctcgctctgtcaccaggctggagtgcagtggcgtacagtcttggcccactgcaacctctgtctcctgggttcaagcgattctcctgcctcagcctcctgagtagctgggactacaggcatgtgacaccacactaattttttgtatttttaatagagactgggtttcaccacgttggccaggatggtcttgatctcttgacctcgtgatctgccctcctcggcctcccaaagtgctgggattacaggcgtgagccacagcccccggctgtctgttaaactgtttactgtattgtatgacctccagccatccaaatcccttacctgggcattcaagaccttaaaaaatcagacttctaaaatgtgtgcattttatcatatgcggatagtacctaatttaaaagttaagctgatcctcaaaacacttgttattttctgatttttttatagttgccatcctagtgggtgtgagataatatcttattaggaaacctcatttgtttttaacttttttgttaattaatgtatttaagactataaatttgcctttaagtactgctttagatgtgtacaaattcaatcatgtagtattttattcagttctattttttttagtccaaatgttatttaatagtgtgctatttagtttctgaataagcaggactttattttagccatcttttaaaaaatattaattctgtgatggcattgtagttggaaaacattgtcagaatgggattgattccttggaacttactgaaacttcctttatggcctaatatgtgatctattattgcaaatgttttaggtataatcaaaagaatgttttctgtttgtgttgtgtacacacacacacacacacacacatatatatatatatatttgagacagaatcttgctctgtcacccaggcatgatcttgacttactgcaacctccacctccagggttcaagcaattctcatgcctcagcctcccaagtacctgggactacaggtccgtgccaccatgcctaatttttgtatttttagtaaagatgggttttcaccatgttgtccaggctgatctcaaactcctggtctcaagtgatctgcccaccttgtcctcccaaagtactgggattacagttatgagccaccacaccyggccatatatttttaattgtatttttgcccattcatatcaatgaataaacatttccaaatgcaactgttaatttttgaattttttctatgtatstgatatagytcaagattgtattggtaggtgttatatgtttatgatgattattttgattttatactgttccttaaacatttttaaacagtgaaatataacttacatgaataaagtttataaatcttatatgcatatttaaagcaatacttacagacatccatataaccaccactaaggtcaagaaataggctgggcacrgtggctcacacctgtaatcccagcactttgggaggccaagatgggtggatcacctgaggtcaggagttcaagaccagcccggccaacatggcaaaatcccatctctattaaaaatacaaaaattggcatgtgcctgtactctcagctgcttgggaggctgagacaggaagaatcgcttgaacccaggaggcagaggttgcagtgagccaagatcatgtcactgcactccagcctgggtgacagagtgggaccctgtcttaaaaaaaataaaataaaataaaataaaatattgttaacttttttttagttaacagttttaaaaataaactcacctttctaaccttttctggcactaatccaccttctccaccaacccttccatacacctcatgcttcttagggataaggctgtttgtcactatgcactaattctgctattcattgcacccagtcattttgcttgtttgagacagggtctcactttattgcccaggctggagtgcagtggccccgtcttggctcactgcaacctccgcctcctgagttcaagcaattctcctgcctcagcctgccaagtagctggaattaaaggcactcaccaccccatgcccggctaatttttgtatttttagtagagacgggatttcatcatgttggtcaagctggtcttgaacttctgaccttgtgatccgcctgcctcggcttcccaaagtgctgggattacaggcgtgagccactgcacccagccgcccccagtcatttttatggcttctcttacacctagtgatgactgtcatgtgagggtcccttcccccacctcccctgccaaaaacctccccaggcttcaaactgcagctaagtggtacctctgtagagtgtccttcactctctcctcaagagggaacctctgtctctctattctctatatctttacacctttttaaaaaattacccttaagtcagctttcatattcttctcatattgtggttattttgtcacctattacatataaactccttgaagacaggacaaaggtcttaacctctgattttccttagcttgattcggtgtgaggcatatggtaagtgctcaaccaatattttaaagaaatgaatagaatctcttctttaattcagctatgtttcattattcaagatagctagcattttttccccttaaaacatctctttggccaggcacggtggctcatgcctgtaatctcagcactttgggaggctgaggcgggcarattgtctgtgttcaggagttcaagaccagcctggccaaaatagtgaaaccctgtctctgctaaaaatacaaaagattagctgggcgtggtggcatgcacctgtaatcccagctactcaggagtccgaggcaggagaatcacttgaacctgggaggtggaggttgcagtgagctgagatcatgccattgcactctagcttgggcaacaagagtgaaattccatctcaaaaaacaaaacaaaacaaatctctttatgttcatttcttttccattttgattgctgctctgcagaaagagaaagaggaaggatcgaaagaagaataaaaggaaagaaaggaggaagggagggagaaagggagggagggaaggagggagggagggagggaaggaaggaaggaaggaaggaaactacatttagatcccctttccagaccaattacatgagaatttctggagaatgagtccagcatccttaattttctcatgtgccaccaggattgagaaccactgcttttttggtcccttttaatttcaccagttttatctctaaacctctaaaacagggagggagggagggaggaacccagtggcttttagggcctcgtttcacaggcccatccaatctattcagctacttcttccaacaggtgcctctgctccaaggctcatccaggtcccacaggcacgctgtgctcccgtctttattctytgctccttgtacctggatgtttcccttctcccctcccctactcacattctaaccatccttccaagctattccctcctcctcaaagcttcccagaccactactatcatccctttctaaatcccygtggttgaaataagcatgctgaccrtagctaataacactgtattgaatgctggaaattggcaaagagtgtagatttcaggtgttctcaccacacacacacacacacacacacacaaaggtaactgtcaggagatggatatgttaatttgcttgactgtagtattcatttcactatggatatgtactgcaaaatgccatgctgcacacttcaaatatatactgtaaaagaaataagaccttcgagtcggcacaaaatccaacacaatggacttatccccaccaccagtccatgcacttgtctctctaagatcacaaataccctgagaacagggaccatggctaagattctgtggccatgaccctggcctctaacgctgtggagacatggtttgctaatggaatgctttttccagaggaggccctttaacctaaccctctcctgccacagagtaaaggaagaaacaagaagtttcagtgacttacgggaagtcgtacaccttgacccraatctagcaacctcaaggctcttctctggttgtttattcacagccatctgttttcctcattctctcctctgattccccctcaggagygacagaaggccctttaccctcacctttctctcttagtcttatgaactgtgtctttctcagtgataggtcactcagctgctgtatttggtggcagagcccagagaacagcacagaaccacagccctcagggcaattcagatgctggggtttttttctgaaagtccttccctgaagagttattccttgtgagggaggggggaggaggacatttctggacttattgctgacatacacaccaaaggctgagtttgtcttctgggttaaacagaggcactatggctctaaattggccaggaagaggcttcagctgaggctacaggagggcagaccaccaagcgagtataaaagaaaaaagcaggctgggcacagtggctcatgcctgtaatcccaacattttggaaggctggggtgggcagatcacttgaggcccggagtttgaaaccaggctggccagcatggcaagacccagtctctacaaaaaatacaaaaattagcgcggtgtggtggtatgcacctgtagatccaggaatttgggaggctgaggtgggaggatcgcttgagcccagaaggtcgaggctgcagtgagccataaccacrccactgcactccagcccaggtgacagagcaagaccgtctcaaagaaacaaaaatgaaagaaaaagaaaaaatatataacagttaagtagaagcagaagcttccaccaatttgagggaaaagcaacctttataaaccaatgtcaagccaggacaggcagaaaagagcacctcttgagtagacaggctgacaggggccctggaattcaggctaggagcacatgttcatgagagaattagaatactgcactccagcaataatcccaaatccttggcagatgttaaagtgatttccatccccatgaggtgcagagatactaggaatcccccctggatttcttcctgggcaaggctgttgccaaggtccccaactgaaggtagaaagggtgacagtggccagcggagtgagaaagacagcaggggctgggcccacacaggtggccgccgttcccaccggcagcagttaaggctttgattagcagcccacagcagccatggctggggagggccacctcccacccgggcacaagccgaaggacacttgtgacaggacagctgcggatggtgggtactctcatgccctgtgtctttccacactgggatattcactatcacgtatacccccattcacacctggaaccactctgctagtccccaagaggagattcggactgttagaacgagataatttcagagctttaaatggctcccatttatgagaaactggatgagagagcaaagcaaagcattcacgactcacgtgctacagatgttcaagccaggagaactagcaggaaggggttctttccagccttcactctgccatttaccaagtatgtaccaagtatgtgagcctgggcactgtggatgtggctcaccattcctgcatctggggtgggcagatcacttgaggccaggcgtttgagaccaggcttgccaacacggcaagaccccgtctctacaaaacatacaaaaattagcgaggtgtggtggtatgcacctgtagatccaggaacttgggaggctgaggtgggaggatcgcttgagcccagaaggtcgaggctgcagtgagccgtgaccacatgagggggtcgagcaaaatgactctttgaaaatggccctgacaattctctagttacaaaccctcatttcacaatcattaagtgagggctccaatcacacagccagttgggtcagagcagagctggaatctgcctccctggatctcgtgcttctctgctctacccggcatctccttcctcccacctgtgattcccagtcatgctgtcaataggagtggcgggaggaggatcctggagccataagctagaaaggtccccaagacgcaggccgcaggctacgtgggaaatttccagatgctaagagaaggccgctctgctctttgtcagggctccccgtgaaactgacgaaaagtcaaattccatggaggtgactaaagacaactcgactctatctgtattatttgaatttcatacaatcaagcaggtatttcggtatgacttaattaaaaactgaatacagagtcttaaaacttctatcatttagattctttttttttttttttggagacagaatcttgctgcgttgcccaggctggagtgcagtggcacaatctcagctcactgcagcctctgcctcctgggttcaagaagtwctcctgtctcagccccccaagtagctgggattacaggcatgggccaccacacccagctaatttttgtatttttagtagaaatgaagtttcaccattttggccaggccggtctcaaactccagatctccagtgatctgcctgcctcggcctcccaaagtgctgagattacaggtgtgagtcaccacacctggcctagattcatttattttggcttaactaatatctaataggtaaatcacagatatcccactggaggaacattctcacataactccttgtggataataatcacagctaacattgagaggatgccgtgtgccaggagttttgtagatgtgatatcatctcatgcttacgggacgtgtggctgttaccagcaccttacagatgygaacacagagggttggagagttaggtcatttattcatccacacaggggaggtttggggccaggatcaaacccacgtgtgttggatagactgactccacagtccatgtccccgatccctgcaccacactgcctctcggtgggtatttacacctgacactaatatgtctctctaacgccattactgaagtcaagttctgacagagtaaggaagataagagacaacatcagagcacctgggctcaaggcccagctccaccacttattacttaggagaagttaacctttatgaactgcagtgtctcatccaaacaagaatgattctagatgattgctcacagaactgttgtgaagactaagtctgagaacccatgaacaatgctcagtgcaatgcctggtatataataagctctcaacagaaacacataatcatggttcaggacaccaaagagcacctgggcccccatcacagcactgctgctggccagccctggattgaagcaccatgctcccaggctgccagcttctgcagatttcagctaccctgaacattccctgccttaaagtcagcttccagaagagcacatttgatcccaagttaaattgtgaagtagacgaccagctgccattcatatggagcccagtgtggatgcgtaggtaagttagaggatgaagcgctgccttcagggtcacaccaacaaacttgaggactgactactacagaatccgtgagtgttctggctggtttagaggcctcggttatcccagttgtctgtattgacaagcagcaatcttgatgcgccacctgagtgagggttccactcagctgtaaatgacatgttataatagttttaaatttatatgtgactttttcacttttgtgtcttaaaagccaaaggaaatgacctcagttgttttttatttttccaaaacaaagtccaaaaggtatagactttccagcaccatctccaatggcatgtttccataaaccctctgcataggcacgcccaaccactcgccactctgaaaatgcatcgtgctttctcgtgcctctgtgccttgggctctcaccctccctacctgagaatgactcacttccttgtctccattaaagcatttggttacttcttcctgctttcagaccttttgtataagacgtcagttatgtcttcctaccagactgtagaccacatgaggacaagacgcgcctccttgtcatctgtgtccaccagtckactagaaaagctgaaaaaaggaaaggggatggtccttaagctgtaatgcagacacattttcatgactgcaaatgatagccttccaacctcatgataagtatcaggccacttggcttacttactcttccatgtattgtaatacgtcattataaattgcaggtaaccaacatattgacatatattgtggtgaagaagagcaagtttgactactttaaacattgctttttatkccttatcattttaaatgtgttgctacttttgatgcactgcttactgacatttattgcttcctctgcacaagcacaaaatgctggctcactctcagattcantgtagaactggngaaagtcattaaatgccatgagccttgggttttttcccakgtactstagtaaattcctcttgttgggattgtaattgcaggtggtmatcagagaacacagagcccmcggaagaattttatgrcatttcaggcaagccacaggycagcctggggaaaaagcaggaagaaaaactggcaatacgagggcccaacccaaaagttattcctgaagagaaacaacggtaagaacttgcaggaatcaaattagttctgatgyagtaggcagaattcttagagaggccccttttattyaaaaatgattttactggccgggcacggtggctcacgcctataatcccagcactttgggaggccgaggcgggcrgatcatgaggtcaggagatcgaraccatcctggttaacacggtgaaaccycgtctctactaaaaatacaaaaaaattagcctggcgtggtgtgggtgcctgtagtcccagctactcgggaggctgaggcaggagaatggcgtgaacccgggaggcggagcttgcagtgagcccgagatcgcgccactgyactccagcctgggtgacagcaagactccatctcaaaaaaaaaaaaaaagactttaccaatatgtagtcagaaattgttcaacataagctttctggtattccagtcataatactctagctgttcggacaacgccttctctctcgcaagctctcctcttttttcattctctttaaatctcctatctggcttccctaaataaattttttgtagccagaacttccatttcattgcagtggttagttttgtgtctcccattgctctttagtaacttttaatgacctgagacatcgttggcttcctttccttttccacttcctccaagtcaattgatagcacaccctacactctgtgtttacaagcgtcagagaaggcagcaataattttttttttttttttttttgcctcatcttcactaagggatgcctgaattcttgacagggccagatagaatgcaaaagtggttttctacattgctaagaaataacaggcaagtctagataccacgagagctagcaacctgaagaagtcatctgttcattctttcatttatttaccgtatacggtgttgggtgcacaaaaagcatggagcaaggtgcttcagggtgtttagcaatgagcaasacaaagacactgacaaggagctttcattctgcaagccgaaaaagacaggagctcaaattgataccatacaagtagcatgaaataggcaccccagagagggacacagctatggaaaaatcaaatgagggaaagattacatctcattgggaaagacttggtggaggttcaggtcagttctgggaatgatgagtctgaagtcattggggcattcaagggaagcatgagcaggcagtgggaacctgggaccacwatcaggaagaaaagggtgggtaggatataaggggtccaaagtcacttggaagaggttgtcgtggctggagcagtgaggggctcacacctgagactccagtactttaaagaggctgaggcaggaggatcacttcagccaaggagtttgagaaagaggttatcctcaattccctaattcctgttccgcctactgggatgcttccactcctacagcttccagagcctggtgcagctggggcttttaacttaccaacagatgttctgctgcagctggctcatccaggatccaccataagggacttccgcttaggcaaaattgcatttcagtttttaaaacaaaagagggtcaggcacggtggctaaaggcctttgggaggctgaggtgaggggatctcttgaggccaggagttcagcaacagcctggccaacaatgtgaggctccatctctaaaaaaaaaattaaaaattagctggacacagtggcatgtgcctgtagtcccagacactcaggaggctgaagtgggaggcagaagcatcacttgagcccaggagtttgcggctacagtgagctatgatcaggtcattgcactgaagcttaggcaacagaacaaagaccctcacaaaaaaaaaaaaaaaaaaaaaaaaaaaaaaaaaaaattaaaaattgaaagggatttttgttgttttgttaggtttttttggtttttgttgttttcttattttttacattgtcttcacagacatcaccctgttagatttttttttttctttttccttttttgagacagggtctcactctatcacataggctgaagtgcagtggctcaggacggctcacaagagcctcaaccccctgggctcaagggatcctcctccctcaacctcccagatagctgcgattgtaggcacatgccaccacacccggctgattttatattttgtagagatggtgtctcactatactgcccaggctggtctcctggcctcaagcaatcctcctgcctcagcctcccaaagtgctgggattataggtgtgagccactagaccaggtcccagacattctttttgaatatacctaagacatttgcaataacagattatgtattatgccatagaccaggaaataatttattatttcattttttctcatttttaagaatgcccagttttttgtcattggtggtggtggtggtggtttttttctgtttttcrtttgtttggttgttttttgttgcccaagctggaatgcagtggcacgatctcagctcactgcaacctctgcctcctgggttcaaatgattctcccacctcagcctcccaagtagctgggattacagcgtgtgccatgacgcccagctgatttttgtattataagtagacacagggtttcaccatgttggccaagttggtctcgaacttctgatctcaagtgattcactcacctcaaccttccaaagtgctgggattacaggtgtgaaccaccatgctcggcccccatggtttccttaatctgaaaagtataaaaaaggttttttttaatccagattcccactagccagargtaatatcatttatagtaccaaacttttctatttgattaatgcaattaaggcaaattaatatttgtgtgttgattcttttatttgcatttttttwaaaaacaaaacttggatgttgtaattttgttattttctttttcactcgattatgtatcatggccttttttgacatatgcatctacattatcattttagattcctgcaggatattccagtttattgatargcattcaggttatattgatagacattcaggttatttccactggtttttttttttctttttttctttcttttcagacagagttttgctcttgttgcccaggctggagtgcaatgtaacaatctcggctcactgcaacctccacctcctgggttcaaacgattctcctgcctcagccttcccagttgctaggcctacaggcatgcaccaccacacctggctaattttttgtatttttagtagagatggagttttgccatgttggccaggctggtctcgaactcctgacctcaggtaatccacccgccttggcctctcaaagtgctgtaagccaccacacctggctgtttatttccacttttaaattgcttttagataatactgtgataataaacatcttcatatgtatactcttgtgcatgtatctgggtgtctctccttactatccatttatagaagtaggattactaggtcraaagatgtggttaacggtattaatacacattgtccttaaatttaacatcacgtcatctaaactgtggcctcaccttccctcccctctaagtacttcccactcatcatgtggtacctctttcccagctctacacctatcttgacccccattcctgcaaggcctaagctgcctactagctgcctattagctaatcaacagaatattcactttttagagcttttaaaattatkactcattttcatgaagattaaaatgacttccagagccaaggaatgaagctataatgaagacaacaaagacaggagaacgatgatgggggttgatccttggctgatagacttcaaagtcaaccattagcacccaggatgagtcattttgaattaraatcagatactctgcccayctataatgagagatcttcttgatctttaatgagtaccatctcttcattgaaacagtcaccagaatttgcatttccaagatctcttgccactttccccaaaataccttctatggccattacacagaaaaaaacttatctgtgcctgcaaagaaaactcagctttggaccaaattatccccactgtgtacaacaaaatcacattcctctggcctctgtatttctctccgtagtccatttcaacgcttatagcaaatcaacattgtgacccaataattattaagtccattaatctttactgcattattaatcgcaaayctcaccaactaaccttgcaaagtgcatatgtgggyaagccatggaagctagaaagagtttcctgggaaaatctgggatcttatttcatgtcctcacatttctctgaaggaaaaaaacttgtaaacattgagtcaaaaccttacaaattttggagggaggaggagtgcaaaaaattcttacaaatttcacaaggttacaaagcaaaaggggaatgtggtcttgaaaaattcttaaaacttaaccagaatgaatgacgactgatctttctttccaatagtttgatgtttggattagtgcatttccgttgygaaatccrattttctattatccagttacacctagtaggcatgaaataaatgtttgttgaaatgaattaaatgyaatatgctcaggtcaatgtctttcacattctttataaggtcttatatttggaaaataatattaacaaccatttccatgaataacatttacttcatccatagaaaatgtaaagatactaccaaagggagccatcctaagatgcctgaaatgagttattaaattctaacttaaccacaaccaatattactaatttgttttaaataacttgtccaactcctagaaggaaacaaggatttggggagcagaagtagatcaagaaaattagtattaaatggcaggrgtaaagggataacatttgaaattctggcttcctggagtgatcagtcaaaagctctcctgctggaaaataatatcttgaattgaaaagcattcggatcatggtcgatttttaacccaattaaatttccttctcctaggtagcctatttactaaagcagtatgatagctgttaatattatcatttaataaacatattgctagtaaaaatgaactctattccaactattaccacagcataaataaagattttttctcaaaatgttagcttggtttgggattgctgctttttctttccaattgatttgcctctgcccagctgatctgcctctgaggagctaaaaaataccaataaatagtaacacagactattaaagtatgcttttcataatatgtcaatatctttctatttctcaggataaccatatgcaggaaggatagggaaacaataaactattattttaactgcctaacagcgttttttcaactagaaaccacattcaaacaaccttatttttcactatgcagcacgtagtccttctcttatttcctttttcttaaaaaaattgaatgtattttgctaatcttctctgtatctttccaattttaccctgtgtgctgccgaagagagcacttttctgggggaggggaggggaggggtgttgtttttctatttttgtttttaagacagagtcttgcactgtcacccaggctggagtgcagcggcatgatctcagctcattgcaacctccgactcccaggagtcaagcaattctcatgcctcagcctccctagtagctgggattacaggtgtgtgccaccacgcttggataatttttgtatttttagcagagacggttttgccctgttggccaggctgctatccactcctggcctcaactgacccacccacctcagcctccaaaagtgctgggactacaggcatgagccaccatgcctggcccagaacttcctaagaaacacttacacgtcactgcttrctgtctcacacttccttgggtgaattccctggagagtgaaaagattcaaacagacacaaaatggcaatacatgctctgtccacttcacaggaatttacctgaatagtttcagacacagactttatcataattaagaatttttgttttttggggtttttttttttagatggagtcttgctctgtcgcccaggctgaaatgcagtagcgtgatttcggctcactgcaagctccacctcccgggttcacaccattctcctgcctcagcctcctgactagctgggattataggcatgtgcctggctaatttttgtatttttagtasagacgggatttcatcatgttggtcaggctggtctcaaactcctgaccttttgatccgcatgcctcagcctcccaaagtgttgggattacaggcatgagccactgcgcccggccagagaaatattttttaataaacaacttcagaggccaggcacagtagcttatacctttaatcccagtactttgggaggccaatggggggaggaacacttgaggccagttcaaccagcctgggcaacacagcaggaccccatctcaacaaaaaaattaagcactttgggaggccaaggtgggaggatggcttaaggtaaagagttcgagaccagcytcagctacttggcaagaacctgtctcaagaaaacaaagaaaaaatttaaaaaaacacaaaaactaattaaattatgattatagaaatcttccgaaagataagaaaatgttcgtcaaataccaagtaaagatttttaaaaagagtacgtgccacagtgaccaactcatcctggttaatctagaactgctacagttttaaaactaaaactgttttaaagtccacagttcatgccaggcacagtggctcatgcctgtaatcccagcactttgggaggccatggcaggtagatggcttgaggccaggagtttgagaccagcctgaccaacgtggtgaaactccatctctactaaaaatacaaaaattagctggatgtgcaggtgcatacctgtaatcccagctactcgggaggctgaggcatgacaattgcttgaacccagggggcagaggttgcaatgagccaagatcgtgccacygtactccagcctgggtgataagagtgagacattgtctcaaaaaataaaataaagcccacagtcctgggaacaccccacagaccaaactgaggcaactgattaccctagcataagcaatctttgaatgaaaatatcaaaatcatsaagaccactccctttaactgaattaaacagcctttattgaatgccttctgtgtataaagtacaggcagcccttcatacccacaggttccatatccatggatacaaccaaccatggatctaaaatatttgggggtaaaactgcagtaaaagtaatacaacaatataaataatacaaatttaaaacccatgtagtataactatttacatagcatttacatkgcagtagatattaagaaatttagcgatgatttagagtacacaggaggatgaagttttatacgcattgactatgccattatatcagggacttgagcatctgtggattttggtattcctagggtcctagaaccaatccccaacagataccaaggatgactgcactgtgctgagcaggaatcagtcagggtccaggcaggagacggacagtacagccaaactgggcgatctgacgacagtgtcacaaagaggctatttacagaggtgtgggcatagttagggaaaacaatgaacagagaagcatcctgggctagcaagagtgggggctgccagcacctgaaaaggcagaggaggctgtccaacctgaactcaccacgacccagcaggaggcggcaagccctcccctcctccaccctacagactagcactgtgcctcccactgggtaaatctgactacaaggcagaggaagggggcttgttgatggagtcctcgcctgtcagcaccccaagccacagagcagrgcagagtgagtctgaaggcacacaaacaacacataagcctggcccctgctcttggcaacttaaaaatctaagggaaacatcaagtcgttattttaggcacatactgagacaactcactagtgccaaaaactgagtgtttaggtctaaccggtccctgcagaattaaatcaaaatcaagttattcattccttatggctcctgatctgctttcggttagaatgaatgagccctggggattaaaagagagatttatgtatccgtgaaattattttactcatcccacatacctgtgctagtttgagttctgcatctgtcccctcactttttgtgcgcgtttgagagagtcttgctctgacacccaggctctggagtgcaggggcatgatcttggctcactataaccttgacctcctgggttcaaatgattctcctgcctcagcttcccaagtagctgggaccacaggcatgtgccatcacacccagctaatttttgtattttttttttttaagtagagacagggtttcattatatgttggcccggctggtctcaaactcctgacttcatataatccacccaccttggcctcccaacgtgatgggattatagacgtgagccaccatgccgagcctgtcccctctttataattccaaaggtgagggtgtctttcgtgtaacatgtcagggcttaccttgatgggtttatgctgcagtactgtgccaaatgtctataccctgaagcaacctgctcgcgtccggaatcggtgggttcttggtctcactgacttcaaatgtgatgccgcagaccctcgctctgagtgtcacagttcttaaaggcagcgtgtccggagtttgttccttctgctgctcggatgtgtttggagtttcttccttctggtgggttcgtggtcttgctggcttcagaagtgaagctgcagaccttcgcagtgagtgttacagctcttaatgcagcgcgtctggaattcttcgttcctctcgttgggttcgtggtctcactggcttcaggagtgaagctgcaaaccttcgggtgagtgctacaactcacaaaagcagtgtggactcaaagaattagcagcaacaatatttattgcaaagagcaaaaaaataaagcttccaaaccctggaaaaagaccacagcagattaccgctgctggctcgggcagcctgcttttattctcttacctggccccacccacatcctgctgattggtccattttacagagagccaattggtctgttttacagagagctgattggtccgttttgacagggtactgattggtgcctttacaatccctgagctggacacaaaagttctccacatccccgctagattagctagacacagagtgtcgattgctgcattcacaaaccctgagctagacacagggtttgtgtctagctgattggtgtgtttacaaaccttgagctagatacagagtgctgattggtgtatttacaatcccttagctagacataaaggttctccaagtccccaccagaatcaggagcccagctggctttacacagtggatcccgcaccgagggtgcaggtggagctgcctgccagtcctgcgcctgtgcgcccacactcctcagcccttgggtggccgatgggactgggcgccgtggagcagggggcggcgctcgtgggggaggctccggcggcgtaggagcccacagcgaggtggggaggctcaggcatggcgggctgcaggtcccgagccctgccccgctgggaggcctggggaggcagctaaggcccggcgagaagtcgagcacagcagctgctggcccaggtgctaggcctctcactgcccggggcttgctggtggacctgcacctccggggcttgcgggcggacctgcccgccgagcccacgcccacccggaactcgcactggcctgcaagcaccgcgcacagccccggttccgcccgcgcctctccctccacaccttcccgcaagctgagggaagcagctccagccttggccagcccagaaaggggctcccacagtgcagcggcgggctgaggggctcaagcgtggccagagtgggcgccaaggccgaggaggcgccgagagcgagcgagggctgtgaacaaactccggacacgctgtcacctctcactcttaccaaaggtgagcatctctgtgcttttccaaaatgtgtccatttttgtcaaagccaaaaacaaaagagcaaattaccaagcagcgtttcactgcatttatctgttgtctacaactcctgacttgctaagggcgactgaaatttacaggaggaacatcacaggaaatcatcacgaatgtcagctccaaaatggtccccatgtcttattctttccatcaccattaatccaagatttagaggttaaaattctaataaatgggcccggcacggtggctcatgtctgtaatcccagcactttggcgtacacaggcagataacttgaattcaggagttcaagaccagcctgggcaacatttgtctctacaagaaatacaaaaaaattaggccggcgtggcggctctcgcgcataatcccagcactttgggaggccgaggtgggcggatcacaaggtcaggagttccagaccagcctgaccaacatggtgaaaccctgtctgtactaaaaatacaaaaattagccaggcgtggtacgcacctgtaatcccagctactcaggaggctgaggcaggagaattgcttgaacctgggaggcagacgttgcagtaagccaagatcgcaccattgyactccagcctaggggacagggcgagactctgtctcaaaaaaaaaaaaaaaaaaaattagctggatatgctggcacacacctgtggtcccacctatttgggaggctgaggcgagaggattgcttgagcccacagtggttgcagtgagctgagatggcatcactgccttctagtccagcctgggtgagagagtgagacctgtctcaaaaaaaaaaaaaagtcgaataaatgtatcataaaattagatttcattctgttagcattaaactgcagaaattcctcacacaatgatatcatcatggcagctaatgtctcatgaaaagacaagtctccatgtgaagggtgcttatgatttttggaaaacaagttagtctgagactccattcttctctttgtaaaatgtgggaaataatgggtgactcattgattgttgtaaggattaaataatataatttccaaaaatacctaacactaagtaggctctaaaattagtctccccaccctcaaactctctaccttaccctaagtgcatatatacatttaaatacatagttttagtcactttgtttaacaatgttacattttagtaatttaaaaaatatattttccccaaaaccagaaactccaaatgtatctccacttccctgacacaaagtagctatctgccaacacaaggaatggggtgaaaggaataggacattccattgaaccaggagtttccagagaagtgtgggtttcttcctttcaacctctttgatgtaatctaaatcaataagtaatgacagtttgtccaaaagtgtcatacattcaggtgaggaagaagggtaggaagctcatggatgtatgcagaggaacttaagaactcctctcraacactgtaaaacaggttttctgtccatrcatagggtggatttgcaacacagccttccacaggctcaagcccatctgttgtaaggagcatgagttaggacagaacaaggaggaaaactaccaagtcatctctcttcacacaagtccagccaagtattgattgtttattcaaagctttcttttctccctccctctctctgttcagtcactatcccctgcctcccacccaccccctccctccaccaaatgaaattaaatttctcaactacctctatttgatgctgtgtttagcataagccctgagtagatatggattctgtttcttgaattttccctgacaaaccgcttccagctgccctttggggtgggatgccaccgtgataaaatacagtgtcatgtttgctgaggatttcagctgccacctgggggctcatgcactcaatgagtgctctttagcaaggctggtggtgacatggtgacaaacggtatgttgacttttttctttctgtggtttaggactggttggtttcagtcttgctggctctttctcctgggttaccaacattttccacatttagagcctgtgactgcctctcctccaggattattgcagcaagctccttgctgtcgacagaagccatttgttggttagagggtttacaactgagacgacctacaagtgcccatttgatagttaacccatgcttcagaatttgcttattttttttcctttttaaggactctttcttcaactaaacaktttctcttcagagtgttatcactccgctcccatgaaatgactgggactgttacttcttttatctctggtcacacccagcaaaattaagcttgcttgtggatgattagccgtaggctgatccacatctgagccaattgactggctgcttaggaggactttgcctcgggctcacccctgaagccaccacccctgaggccactgcctgtgccagggcattcccaagcctctatccccagtgtgggcttccctgctgcatgtggctcttcagcctcagsttcctcctcttcactcccccatccttgcatgggcttcctcttccgtcccgcttgcttctagaacatttccaattattgcttccaggtcctgaacactagtggctgaactgaaaaatggaaaagatgatgaaagccaggcactgagaaatcagttaattaaactcttcagaggtccccagaaaggacagattcccctgcacacctgatgaggaatcttggactcttgcttattaaagggaaaggaagtccattttactggacacttgtcgaggaattccagcaagcccctggacagagggcttcagtgaccagggtagctttctgcttttggttgtaaagagatcagaaagtgtcatccttcaaagcgatgtcatgggctcagagccctttctgtgcactttgccatattgtgcccactccggttctcaaggtcagttggccatctgaagtggaacaatgacttctctacaatccagctttaactatttgcacagttccatgccattccactaatttagtacataccagggtgtacccaggcttcaggctggtctgggttctacttcccaagcccagtcccagcacatgccttcccaaagatctttcstcccaggtcccagtctccctcttaggatcaaaccaattcaacttaacccttatttaatgtcttctctctgcctactcagcccagtgtggtagtcaggcacagaaactcatcaattacagcacagagtcagcaggtcaacaacagagtgggataaaattccctcttctccaaacacacaaacccagctctgtagcatcttttttccacccctgaaattcccccaaacagactatcccttgtgctggcatccggcaaggtcctaaagaggccctacagcctgtttttgctcaggctgttttcaagcctttttccaatctactttctctgaaactttgcrtgcatatacacacaccagaatcaacaagtcgactgagcatgcaaaagccacatccacatttctagaccttgataccttctcagacctctggcaaatctaaagcccagaccaactgggattactcccaggttatacattgctttagagaagagaatatttgtcacacctaggcatggatccgagaagtcctcacatgctcacatgcagaaggcccattccttaagtaattagaaatccatcatctaaaaaaaacaatgaccaaatcacattttgattaggattaaaaggtggaggctgggcatggtggctcatgtctgtaatcccagcactttgggaggccaaggcgggtggatcacttgaggtcaggagtttgagacctgcctgggcaacagggtgaaatcctgtctctacaaaaaatacaaaaattagctgtgcatggtggtgcatgtatgtggtcccagctactcaggaggctgaggtgggagaatcacttgagcctgggaagtggaggttgcagtgagccacgatcacgctactacactccagcctgggccataaagtgagactgtgtctcaaaaaaaaaggtagagacaatagtacaggtaccttgaaacatccaaaaacccaaaagcttttctattctgaaaggatcagacaattttcttataagaaatatattttttctgatgaggctttgctggagatattaccagaacaagtgtctccaaccactggtagtctggaaaatgataaaggtgggttctgggtggcacagtgaaaccagcctgagattacaaacctttgctgggggtaaactacagaagcaaccatggagacttaattctgtgtttttctgagattctataattaggtaatgtcatttacatgcttccaagtgagggaaggaaattctttggaggcaaagcgtaacggttccagtactggcaccaaatgtcttcctgctcagcaagtccattttaaagtcttgttcatgagctaagctgagttctcctacagaagcagagtgaagagtcaaggaaatgtgaagactggccaggcacggtggctcatgcctgtgatcccagcactttgggaggctgaggcgagcagatcacaaggtcaggagttcaagaccagcctgaccaacatggtgaaaccccgtctctactaaaaatacaaaattagcctggcgtgctggtgcatgcctatamtcccagstactcaggaggctgaggcagaagaatcgcttgaacccaggaggcggaggttgcagtgagccgagattgcgccattgtactccagcctgggcaacaagagcgaaattccatctcaaaaaaaaaaaaaaaaaaaaaaaaaagaacatacctctttcagcatccccttgcagggtcctccctayctctgtgattccratagtattctctgaaacaacacagaagagttggcctccctccctcgcctgacatagctctttacacagttgcaattccatgcctcactcaccaccccgttctggtgactttcctctgcacacattccgccttgctctccctcttagtttttaacacctatttagcaaatatcctggaaaaatatttccaaaaaaagttaaaagtggttgtttggaatgatgagattaccggtccactgttgtttgctgctwctttgcatgttttcaacgtctgggcctggaacaagtgcaggtattcctttgctcattcygtaacgatgctcagcattgagtgtgctatcctgactagtgygaatactccattgcttgacttctcctgtgtccggaacgttacacttctggtaatacattgtacgattgtatttgtctttttcaagaccacttaacaccttcagcttatataaatctcgtagctaactgaagcctccaggttttttcacatgaagtgttcacataaatcatggatctcccaacctattttcatctttatgagtagttaagacataaatccttcttacagtattaaarggtgctagtgtattaaactacctaaatagccagcatgccttttaaaggggctatcatgatctaattcaaatggtaagaattccagggtctatgtcaggtgcccctggctccctctgtgtctcatccccttccattatggatccamaaaacatgtcttgaaatgttgcctcctggccgggcatggtggctcatgcctgtaatcccagcattttgggaggctgaggtaggcagatcacttgaggtcaggagttcgagaccagcgcctggccaacatagtgaaaccccatctctattaaaaatacaataattagccagatgcggtggcatgcacctgtaatcccagctactcaggagactgaggcaggagaatcacttgaaccccagaggcagaggttgcagtgagccgagatgcaggttgcagtgagccaacatcgcaccactgcactccagcctgagtgacagagaaagactctgtctcaaaaaaaaaaaagaaatcattgcctcctgcaaaaattaatatgcaagaaaattcaagggactagtaatctgtggaaggagggggaagatggtaatgttttatttcttttcggtgtcaattacatgakgtcattttattttataatatattctcttgtatgtgtgaaatacaaattttaaatatgtgataatttaaaagtaatatgtagagttgatttaaaataggaaaaaatgactgggcatggtggtccatccctgtaatcccagcactctgggaggctgagacaggaggatcacttgagccaaggagtttgggactggcctgggcaacatagcaagatcctgtctctacaaaaagtacaaaaattagctaagcatgatggtgcatgcttgtagttccagctactcaggaggctgaggcgggaggattgcttgagccccagagattgcaaatgtagtgagctctgattgtgccaccgcaccccagcctgggcaacagagccagaccctgtctctaaattaattaattaatttaatttaatgggaagaaatggctgggcactgcggcttatgcctgtaatcccagcacattgggaggcagaggctggaggatcacttgaggcaagaaatccaagaccagcctgagcaacatagcaagaccccatctctacaaaaacattaaaaaataaaaaattcactgggcatagtggtgaatgcctgcagtcatagctactcaggaggctgaggtgggaggcttgctggagcctgggaggttgaggcagcaaatgagctctggttgcaccactgcactgcagcctgggcaacagagagagatcctgttttttttaaaaaaaaggggggggattgtgggggaattctcagtatcccttcaattttgaggggaaaaaaggtaataagaaaaaacaaggagaaagcaatagataagcaaatgaaagggaggaaaacagattcaagtttgaaaaggaaaatgaaagaaaagatagcggcctggaagacaggcagagataggaggattagatggagtatttggctgaacagggacaacagaggtggtgaggagtccctgcggcgctgcagagtgggagagagcggaacagtgaaagctacttcggatcctccaagaaacgtcagcaaatccatcctattcctcagcattctgcttcagccacctaaggcagtcagcctcccactgccgttcagcctgtgtggcccagagccaggaagcacgttccctcgcagctctgggtacagattccctatacacatgagtgtctccctcccggtgactcagctgctgtgctttcctctccttccccagggcctgagcagtagcctgcctgatgatgatcaagcagagccctgcaagtttcaagaggaatgtcagtgactcttcactgaaaccccccaggtaggcatgcagtgacaatccagggctttcctggacacattgcaatcctaacctcagggtaaaagccatgtccctgttccgccacagcatggcaaaatcaattccagttggattaaaaagttmcatgtttttaaaaaaatgaaaccgtaaaaatgtatgtgactcagataaagtaaaaaaaaaaaaagaaaaaagtgagtggttatgtgtttttaaaaagacagagatsaaatggataaatattacacaagactagtctaaattgtttrgtgyacaccatgaaatacttttttcaacctctggctccaaatctccaaayttttgtccccttccttactccttgtgctgaacagacagccttttagtcactcagttttaagaraaacttcattctggtcattaagactccatctcaggtatgaaaatttcagtaagtgaaggcaaagattaattttatattcgtttaaaggcttttcccgtccacctaaggccaggcttgcagtccctgttctggaaggtgggctgtttgctctttctgcattttactcctcttctcctctctctctgcagtttctttttctttttcttttcttttcttcttcttttttttttttcttgagacagagtctcactctgttrcccaggttggagtgcaatggcacaatctcgtgtcactgcaacctctgcttcctgggttcaagctattctcctgcctcagccacccaagtagctaggattacaggtgatggctaatttttgtattttttagtagagatggrgtttcaccatgttggccaggctggtctcgaattcctggcctcaggtgatccatccgtctcagcctcccaaagtgctgggattacaggcatgagccaccacgcccagccctctctctgctgtttccccctctggcgttgtcgggaagggaggggaaaggactaggggaaaggtgcctttatgtaagtcatgcagctgtcctkacagtyaaactctctctctgggagggtccccttgtgtgggctcaagagacctttgagggtctctccagggcactgttgtctgatgcatactgggtcatcycagagtcccactcctaggctcctgccagctctcyccatcacagcctggggcacatgatgcaggrggctccccaccagacagccagccaccttgggcgggtcaccagccagatggcctgagtcactgtctgctgcattcacttggcccacagcacatccttccactccacattccagatggggagagtgtagctgctctctctgtctgctttctcttcatcccgctgggacgggmtgctscagcaagacttttgcattcagaattctctagatgaaaaggagagaccagtttctatgttcagtyagactcctaattcaggaaggggagggcacwgggatgggaagttgggggatggggatggagggaagatggggatggggaagaggatgggtccacctctctcagaaactttctcattattctgtgctagtgtcagcaccagatgggccttcagaccccagcatctccgygagcagtgagcaaagcggggcacagcagcctcccgstttacaggtaggtcttggtttctcccagtggcaagcttggagtccatctggcaaggaagagcccataggggaatygccccacaccacactctccctttacatctgtcctgtgcttgggtccctttggtggtctggtgaagctgtggactccttagaatgatgtttttggccgggcacagtggctcatgcctgtaatcccagcactttgggaggccgaggcaggcggatcagctgaggtcgggagttcaagaccagcctgaccarcatggagaaacccygtctctactaaaaatacaaaatttgctgggcgtggtggcgcatgcctgtaatcccagctacttaggaggctgaggcaggagaatygcttgaacccrggagatggaggttgcggtgagctgagattcattacatcgttgcactctagcctgggtaacaacagcgaaactctgtctcaaaaaaaagaaaaaaaaaaggacgtttttaagtttataaaataaaatatacaggactacaaaggttatcaattacattgaaatgcagttatcacaatcatttgaaaatgtgtactctagtaataatgcttctttttaaaaaaaatcactttattaggatataattgacatacaaaaagctgtacctattcaggccaggctcagtggctcatggctgtaatcctagccctttgggaggcctaggtgggtggatcgcttgaggaaaggagttcgagaccagcctggccaacatggtgaaaccccatctctactaaaaatacaaaaaaattagccaagcttggtggtgcacacctgtaatcccaactactcaggaggctgaggtgggagaatcacttgaacccaggaggtggaggttgcggcgagctgagatcgctccactgcactctagcacgggcaacaagagcgaaactccatctcaaaaaaaaaaatagttgtacatatttaatgtatacgtgcacccccatgaaactatcaccacaatttatgttataaacatatccatcatctccaaaaggttcccccgccctctgtatttatgtgcatgtgtgcacgtgatgggggggggtgggatgagagcacctaacagttaagatctaccctcttggtaaatgctcaagtatgcaagttctgttaactatagacagcatgctctccagtagctctttagaacttgtataagggaaatgttgtaccctttgaccaagccctcctgtttcccactcccccagcccctgtcaaccatcattctgctctttgcttctatgtgtttgactattttatatttctcaagtgaaatgatgtagtgcttgtccttctgtgtctggcttctttcacttagatgatgctttattaaaacatartataacaaggtctaacagtgatttctaactagtgatgagtataaaggtattttgctatatctgcaatagctgtatgtwatatgaaaacacgtgtgctttctactagagactaagttacagttgttgctggtactactatrgtttgttgcgtacattcataattgggggaaatgcaacatttcagctagaggatagtgaaaataaggatggaatatttttcccattgatgtttgcaacctgccaaggacagacaaagaacccttgcactagactgactactgcctgctccagggaatcctcccacagccttcctggcctctgcttatataggtcaggagggtgcaggggacatggctgcagggctggtttggtggcctcttggtgaggtttgcagaatcacctggcaacttccctaggagtggagagacatgaaagccaatgctactcagcttttttttttttctgctacgcactttattagcaacttagctttttttttccctcataacccatagacttagcaggaggagcatagacattaagagtaagtgcacatgaaayattgaaaaggagtaaacatgaatcctctctttgcaaaagacagtctcagaaatttctcatctgctaattcacttaattcaacaaattacatctatcatgtttcaagtgctttgtttatcgatatagtggtaaacagaatacactgatgggacaagcaactctgagatgacagaaygagttccctaaatagtctgttactgtgactcctgtttatgcttgatattcacaaaatattctggaattgatacccgagaaactgctaacagtgattacctctggggagtagagatggaaattgagaggaaaagaagggaatgtcttttcatgttaaactcctttgtactgtctttaaaaataataataaacatctttttatatgatgaaaaacaagttgtaaagacaactttaaaagttttcctaaaggaaaccatatgtgactttaactgatttgagacagtagaagctttctaagtataaaagtaatagaaggaacgatgggggaaattgatagatttcactacacacacaaaaaaagatgcaaaacacgtcacagaccaaaaataacaaacttaagaaatatttgcaacaaaaattaaacaaaaggggccaggcgcagtggctcacgcctgtaatcccagcactttgggaggctgaggcgggtgaatcacctgaggtcaggagtttgagaccagcctggccaacatggtgaaaccccgtgtctactaaaaatacaaaatcagcatggtggcrcatgcctgtaatcccagctactcaggaggctgaggcaggagaatcccttgaaactgggaggtggaggttgcagtgagccgtgatcatgttgcaaaactccgtctcaaaaaaaaaaaaaaatagcctcagcctcccaagtaggggggactacaggcatgcaccaccacgcctggctaatttttgtatttttagtagagacagggtttcaccatgttggccaggatggtctcgatctcttgacctcatgatccacccactttggcctcccagagtgctgggattacaggtgtgagccatcgcaccagctggaaatggtttcttaaataagacccaaaacggacaaatgtttaaaaacgtaaattgaattacatgaaagttaaaaacttcaacacaataacagacatcttagaaaaaatgtaaaaagtcaaaagcctaaaagaaagtgtttgcaacacgaaaaacaaagcattaatatacaaaacatgctaaaattattttaaataaactttaaagaaaatacaatagaaaaaaatgagtaaatgatacatgcagtaattcacagaagaaactgctatagtcaaaaaatacaggctggkctctatggctcccagcactttgggaggccaaggcaaatggatcacttgaggccaggagttggagaccagcctggccaacatggtgaaaccccatctctactaaaagtacaataaatgagccaggcatggtggtgcacacctgtaatcccaactactagggaggctgaggcacaagaatcatttgaacctgggaggcagaggttgcagtgagccaagattatacaccattgcacctcagcgtgggtgaccaagtgagactctgtctcagaaaagtagtaataagtaaaaataaaaataaaacaaatgcaggaaaagttgtacaactttaccacaaacatgtaaatgcaaataaatccacatttcactcccacaaatcatttcrctttcccatatgattagaaaaactttaaaattttgacaaaaccaagtgttagagaggatcgtgggaaaccaaagattctcatgcactattagtgggaatgcaaatttattcaatcactttggagaaaaagttggcattatccagcaaagtgaaaaatgagtacaacctctgacccaattctgcttctgaagaaacacttgtacatgtgtgcaaagagacaaataaagatgtttactgcagtgttgctctatagtagagattagttggaactagctcaaacgtctgtgtgtagaagaatggataaataaactacaatggaacaatatgtgcagtataaacaaaggaaccagatttatacgtagcgacatcaaggaattattaaaaacaatgtggccgggcgcagcggctcacgcctgtaatcccagcactttgggaggccgaggcaggcagatcacctgaggttgggagttcaagcccagcctgaccaacatggagaaaccccatctctactaaaaacacaaaattagccgggcgtggtggcacatgcctgtaatcccagctacttgggaggctgaggctggagaatcgcttcaacctgggaggcggaggttgcagtgagccaagatcacgccattgcactccagcctgggcaacaagagcaaaactctgtctcaaacataaataaataaataattaaawaataaaaataaaataaaataaaataaaataaaataaaaacaatgttgaggccaggcacagtggctcactcctgtaatcctagcactttgggaggctgaggtgggtgaatgacctgaggtcaggagttcaagaccagcctggctaacatggcaaaaccctgtttctactaaaaatgcaaaaaattagctgggcatggtggcaggcacctgtaatcccagctactcaggaggctgaggcagaagaatcacttgaatctgggaggcagaggttgcagtgagccgagatctcgccatttgcactccagcctgggtgacaagagtaaaactctgactcaaaaaaaaaaaaaaaagytgagtaaaaaaaaaatgccacggatagttttatacagtataataccacttatttaaatattcttaaataccaaagcaacattaaatatttacagatgtatttctacctagtaaaagcataaaaaggtgattgaggccgggcgtggtggctcacacctgtaatcccagaactttgggaggtgaggcaggcagatcacctgaggtcaggagttcgagaacagcctgatcaacgtggagaaaccccgtctctactaaaaaatacaaaattagctgggcatggtggcgcatgcctgtattcccagctactcgggaggctgagacaggagaatygctagaacccaggaggcagaggttgtggtgagccaagatcatgcyattgcactccagcctgggcaacaagagtgaaactctgtctcaaaacaaaaagaaaaaaaaaagtaattgatacacactaaatttctgatggaaaggaaatggggaaggaaagaggagaagtgttattgtactttcctatactttaaaaaaattttcccaaaaaaagcagtacatgtgaaattacgaaggagagtgtctgacttttattagatacttgctaaattatagctatccttgaagttatctatcaagaacaggtgctaaaatgtacttgcttcctgtttcccaactacaccaactggtggcttctcctcatcccacgtgtgctaacagcaggctctgtgtatcacagaacaacacagtgtgagccttgagcctcatgtcaagccggtgcttctcaacctggggacaattttcactgccaggggacacttggcaatgtctggaggcattttagtcgtcayagctggggcagagggcgttgctactagaatggagagtgtcgaggccagggaactgctgaacatcctgagattctcaggacagcccccaccacaaagaaccatctggtccaaatgtcaatagtgccgaggttgagaaacccaatgtaagctcatagaaattaacataaataaccgttgcattgaatctaatatactaaatttgactacttttctgatgagtcctttttataaattatcagacaagtgaagccacatcttctttctaatctttctttctaatactggacactgactagaccggagagtgtgggtgatagagctgcttctgccaaaaccatggcctctagtttctcttctctgtatccacagcaggcagaatggcatctgttggaaagggcatatactctaaaatctttttttttttttttgagatggagtcttgctctgtcacctaggctggagtgcagtggtgtgatctctgctcactgcaacctccgcctccygggtttaaacgattctcctgcctcagcctctggagtagctgggattacaggcatgtgccaccgtgcctggctaatttttgtatttttagtagagatggggtttcaccatgttggccaggctggtctcgaactcctgacttcaagtgggccacctgcctcagcctcccaaagtgctgggattacaggtgtgagccaacacacctagcctctataatcattttaattgggcaaaatattatggaatttttttcagtcatgaaaattaatcaggcttgcattctaattcagtctaaccctggctatttccaaagccaaaggaagcacaacacaggtatttcttttcaacctcccaggaaatagttcaactgatccatggaccagatgtcaaatctacaccattaaatcaccttctccatagtcttaaagttcaattggccaaatcatgcatgaagaggctaccagtcatggttacattcagcttcatagcataaaactgcaaaagacaaaggcatatataagattaaatttcatttttctctcagttaaaagaaacctagagataagcagtccagagctgctttggtagctccatgacatcatcatgctccattgcattctctgtgcccctcatcctcatagttccagatgcttgctgaagctcccccagaacatccctgtttctaagttcaaatcagcaggaaggagaagggaagggcatggttctactcttttaagaacacttccaggcagctccttgcaacccaactacttttatctcactggccagaatttaattacctgaccatacttaatggtcaaggaagcagggaaatacagatttctagctgggcagcaatgtgcctgggtgaaaatcaggatttctttgctaaaggagaagcaaagagtgggttttggaaggcagctagtagttgatgctgtagactggtcctctggcagatatactcatgaatactcttctgcccctgtgtagacctaggcatttcccatccagttagtgcatctcactcaaagtccagaatctctaggtgatgtgctcgatcatgtctgcatgtgcctcctcatggtctggtaatttgcaaaccaaaaaatgttatctacatttacatgcaatataattgctggcataggagcaaaataagcagacacacagaaaaactcacattagaaaagcagggaaaggctgggtgtggtggctcatgcctctaaccccaacattttgggattactcagatcactggagcccaggaattcaagaccagcttgggcaacatagtgaagcctcatctctacaaaaaataaaaaataaaattttttttaattagccaggtgtggtggtgtgtgcctgtagtcccagctacttgggaaactgatggtgggagggtcatttaagcccaggaggcagaggttgcagtgagccaagattgcaccactgcactccagcctgggtgacaaagatcctgtctcaaaaaaaaaaaaaaaaagaaaagaaaaaggaagagagaaatattgcaggtattggtccatagcaatgatcaaatcctgctggaaaagaaaagaaaaaggaagagagaaatattgcaggtattggtccacagccatgatcaaatcctgctggaaaagaaaagaaaaaggaagagagaaatattgcaggtattggcccgtagcaatgatcaaatcctgctggaaaagaaaagaaaaaggaagagagaaatattgcaggtattggtccatagcaatgatcaaatcctgctggataggaatggcaaagactccctttgggggcagagaaggtcattccttgattgagctgctgccttgaaggatctctcttgtccattgcccccatggcctctggctttgccctctcaggggtttttccttgtcagttttcctctatggctatatctgagccctgggcattggagataggatcatcttgaagctgcatggtttccaccgccaacttcttgcttgtgcaggtgcaggttcccaggaattcttttcagagttgtctaatcacagtttttgcaggccaagcttgaggtttctgtccaaacataggaagcttccatccaatctctttgcttccagtcaattccaagtgtgggttactacagcctaacactgcgtccagaaacacttctcacgccccaaggctctgatcttttatttagagctctttatgctctggccatcctttccctctccaattggcctggctgccttgagaccatttgaaagaagaaagaagttgggtgagatgggaacacgcttaatctaatctttgtgtctgggcttgtttccattgtctggcaaggaacctaggaagatgctcggaaagtgcctggggccacagccttatctcctgccaaggctggatgggcttgcactcactggaagcwgtatttttcatcctacaagactcccagttacaggactcatagctgagtttagattacaggcagagtctaatctttacaaagctatgtttccttccatctctgttggcaggcaggatagctccagatgagtttatatctttatcacagctcttagctaaaagctgcaagatgcaatcaatacaaaccaaaattttacacttcttaccccttcccccagccacatcttcagtttgcatgttgcttgctttatattattcaggaaatggcaattttgakcaaatgttttgctacagcataacaagggtcactaattttccaactgatgatatctgctcaccactgctccatgtctgatcttctccactaagccaatgacacaattggattttattatatatatcatccaactcatgggtgttgaattttatattgattaggataaggtttagttgcataaaacaggaaaatgcaaaataatatgtttaaacataatacaaggtggtaaccccacagatgtggcttgtcakatgtgtagtatgataagaaacacaatttgcttattaattataacagttcctagtaataacttgtacctgagagtatatgacttagataaaatacctacaggtgagtgtgataacagctccttttcctatgtagcttgtgagacttttctcaagttggaacaggatttaagatgtagtttctcataaggagggatccaaagattttatgataatgtcgactaattcctgacccagaagtctgcagaggctggtgaaggaggggtggggagctgaatcactactgagcaggacgaaggtcagatgggagttgggaaggagagtgtcgagggaagccatcagtggggcccaccagtccagaatctgactataaaattgctaaatagctcaggcgcgaagtctcacactgcaatcccagcactctgggaggctgaggtgggaggactgcttgaggccaggaatttaaggccagcctagtcagcttagtaaaaccctgtccctacaaaaaattttaaaaatagccagacgtgtggtgctgcatgcctgtagtcccagctactcaggaggctgaggcaggaggattgcttgagcccaggagttcaaggctgcagtgagctatgattgaacccactgcacttcagcctggacaacagagcaagaccctgtctcaaaaaaaaaaattgccaaattatgagacaaagagaaagagagtgcatgttgaaatcaaggaaaagtccagagtcctactaccactgattactttaagaaccaacatttcttgtcactgtgtgccaggcagtgtactaaattctttacatacctttactaatctctaaaaaccttatgaggtagatactactatgatcttcattttacagataaggaaactacggcttaaagaggttaatttttccaaagtcatagcaaatagcagagccaagacttgaactcaggtctctcagagagcaacgctaatctcttaacctctatggtaaattgtttgtaaagtagatttgagcttttttttttcttcaaagaaatgactctcaactgtgtcaactattcagcactagccaatcattcatcacctatgtaatcagtctggtttatgaggaaagatatctcagacatacatttcttttctttttagagacaggcccctggctctgttgcccaggttggagtgcagtggcatgattatagctcactgcagcctcagtctcaaactcctaggctcaagcaatcctcctgcctcagcctcccgagtagctagtactacaggcaggtgccactatacccgactaattttatttattgtagacgaggtctcactatgtggctcaggctggtcttgaattactggcttcaagtgatcctccaggctcagcctcccaaagtgctggcatgacaggcctgagccacctcgcctggcctaccccagccatactttactaatttgtattattaagccacatgtcatggactctatgaacaaaaagggggaaagaaagaggttggcatttaggaaaatgagaaaatagaccaagtatgatttgaagaccttttattcctctctcagaaaaccccctctttccctccctcctttctttcatcaaacacttagtgttggccgggctcggtagctcacgcctgtaatctcagcactttgggaggctgaggtgggcagaaaagatcacttgaggtcaggaattcgagaccagcctggccaacatagtgaaaccccatctctattaaaaataaaaattaaaaaaaaaaagttaaataacactgagtgtccactctggtcaggtaaaacactgaggagtagaagtgtcaccagggtcaaagcccagctctgcacttgcagaacagggcgtccagtgctgtcagttaagctcaggtgttgtgtctgcaacgagaggcagctggtctcatggggaagtgagggtagaaatccttttgatgaggcccaagctgaggcctgggaggataaatagaagcttgccaagtgtgggcagactggaaggcaatcccagtagtggaggcaacagtgcacaagcccagagcaggagaaagcatgtgttcagggaagtgttgatgataaccagaatgtgggagccatgggtaggggtgtgacaggaatcagcctgaagatgcctggcatgctacactcaccagcatggacttcatcctagcgagataaatgttagatacaaacgggacatccaatgcatgctttagaaggttcattctagctggctgggcgcggtggctcacccctgtaatcccagcactttgggaggctgaggcaggtggatcgcgaggtcaggagttctagaccggcctgaccaacatggtgaaaccccatctctactgaaagtacaaaaacgagccaggcgtggtggcacacacctgtaatcccagctactcaggtggctgagacaggagaatcacttgaacccgggaggcggaggttgcaatgaaccaagattgccccattgcacttcagcctgggtgacagagcagactctctcaaaaaaaaaaaaaaaaaaagtttagtctagctgcagggtagagaatggtttgaaagatgacttcaatgaaggaaatcaatgagtctatcaaggtaatgcagtgatgaaatggtgagacccagacctagggcacaacaacaggaatggatagtaatgaagagaccggaatgctgctgaggaggtggagagaccagagcttgatgcgtgcttaagcctggtggctgagagaggaggcggggtcaggcccaatgtccaggtacccagctcggacaattaggctgatgagtgggtccaaaaacacagggaagagagaagcaggtttggaaacaggttcaaatcaaatagagctcacaggagtccagagttcacaggacagatctggcctggagaagaagctgtggggtcgctggcatagactaatgggagccaggggaaggatgagattttcccagaagaggactgttggcctcctgccctgcaccccacatagcacacactggccaggtcttctcgctgtgccggcccctcaccccatctactcttgggggtcctgctccatgctgcrttaccccaatccccatcctaaattagttctgtgtccctttctctcagggtctttcctagctactctggtgaatgatttaatgttaaaaattcataggcattggtcaggcacagtggctcacgcctgtaatcccagcactttgggaggtcgaggcgggccgatcatgaggtcaagagttcaagaccagcctggccaacatggtgaaaccctgtctctattgaaaatccaaaaattagccaagagtggtggcgggcacctgtaatcccagctactcatgagattgaggcaggagaattgcttgcacctgggaggcagaggttgcagtgagcagagattgtgccactgcactccagcctgggcgacacagcatgacttcatctcaaaaaaaaaaaaaaaaaatcatgggcattaatgcattattacccaaaacatttctgaattttaatcaaagagaatcaataggatttgaatccatagaagagctcagagcatttcctttcttttatttatttatgtatttgtgataggtggttattactgaggtgacctggccctcatgtcccactcctgccactagaaatctcatttccccaactgtgcgttttccaaaagttgaatatttcctttgcttttcgtgcacagatataaattgcttcccaggtcctgatcctttttaccttagagagcctgtaccagcacttagtgcatttattcatctttgtaatggacaactgcgattgtggctgttttagcacaggacacagacaaaagggaactagaactgtttctcaccagtgcaaggcccttgagtcagaaacacctggcagtgagtggcaaagaagaaacaactgtgaagttaaatgccaataccccagggaagctttcccacaggaatcattagggacttcttcaccatgttcccatggcagtatgtcatttatcatactgcactgcaattcttttgttttcaagtcagtctttccttctacattgtaagttccaaggagagaaatgtcgtaccttctccatctttgtactgcctgtccctgtgccttaacacaatgctgctgtagatagcaggtgtttaataaatatctattgggtgaatgagtctgcagagatatatgtcattcacagagcatgtcagggagcttctcgacacaccaagtcacactgggaggttttccagggaatataagattccttttgctatgttgacctcttgcttcttgacctttgcatgtgctgtgcccgtgatttcaagtacatctctcttcatccctaattaggtaacagctacttagtcttcttaaaattaataaatatcaaggctgagcacagtggctcatgcagttggggaggccaaagctggaagactgcttgaggccaggagtttaacaccagcctgggaaacacagcatttttttccaggtgaaaaacatcatttttcacctggaaaaaaacataaaggatacatactaataacacaggctatatggcaaatgtctaactggtggagcttgagaaagagaattctgagggaagaaaaacagaaactgatagcaagacttggaataggagcaaaacaggagtatgatggcattgggagattccagggaagttcgggaagccaagaggatgaatggacacgggggtaggggtaggagcgtgggaggtatggggaccaggataggaagacatacatggttggatggagagactgatggcaaagmcacacacacacacacacacacacacacaaacaaattttagtaaaagaaaatataaagaaaagaaatcttggcaaactgtaaaactaaagatggaagaaggagaggtaaaaagggaaaatgtgcaaaaagccaagaagtatcttagcttataattattcatctctaaaggcttctatgaaattattccttctgctattcaaagctttcctaaaattctgctcttcctagaagtctttaacagcagagaagtaaacatcttacctcctataatagaacagtgagactggaagggatcttagcaatcaccaagctccttcgtttcacacagaggatggaagtgactcccctgtagacacactgttagatcgccttggagcctgagccaaagtcacagtctgtgtatttctagaatagtgtttattccaacaggtaatttttttctactccattttcccaaacaaatgaccttctcaaaaactggggggaaaaagtctgttttttaaagtaagtcaataaacatttcattgtgaaggactaagcaataggcctgggaggcaagagctggtttttgtactcacagcacctagcccagagcctggcacaaaagtagttttcgatagggttttgttggatggatggatggatggatggatagatggatggatggatggatggatggatggatggctggatatgagatagatggatggatggatgaatggatatgtgatggatagatggatggatgaatgaatgtatgatggatggatggatgaatggatatgagatggatggatggatggatatgtgatggagatgaatggatggatgaatgaatggaaggatagatggataaatgtgttctatttagggctgccaccactattcagatagttattgaatagactgtttcaatgttttctgactttaagaggtatttgatctaacttgcttctgcatatgggccaatgatcccaggttgttttaaagaattcttggtaaatgatctaattaataaatgagatgttttcaaataagttataatctcatcggaaacctaagacatggatgtaagcagaaatgattagcaatacaggaaaacaatgtgttaaacgccaggtgactattcttgcagataagctgtaagtagagtgatataacttattttctaaagtgggtccccttcgagagtgaaagagggccttattaatacaccaacacaataggaaaaaacagggctatatggtccaagtagggggttcagatgagagggcagatttcccatgtactgaggaggcttcttgaactttgcttgtgctgtgccataatttggagcacgtctctcttcattcctaattaggtaacagctacttagtcttaaaattaataactgtaaaggccaggcatggtggctcacccctgtaatctcagcactttgggaggctgaggctggaagactgcttgaggccaggagtttaagacaagtctgggcaacagagcaagactctgtccttgcaaaaaaaagtttttatttaatttaatttattattattattattttgagacggagtcttgctctgttgcccaggctggagagcaatggcacgatcttggctcactgcaacctccacctccygggttcaagagattctcctgcctcagcctcccatgtagctgggactacaggtgtgcaccaccatgcccggctaatttttgtatttttaaaagagacggggtttcaccatgttggccagctggtctcaaactcctgacctcaactgacccacctgcctcagcctcccaaagtgctgggattataggcgtgagccaccatgcccggccaaaaaaatttttttaattagctgggaatggtggcacatgtaggtagtctcagctactcaggaggctggggccagaggactgctggagcctaggagttcaagtctgcagtaagctgtgatcgtgccactgcacaacgacaacaatcaaattaatatatgtgatgtattaaaaataagtttgaaaagtgtgtatgaatgacaaaagctagaaaaaaaattaaagattctgtacatactgtaagtatatagacaggagtttgttatctcatttaaaaaaaaatcacgcgtgtctttctagagttttaaatttcagatatttggctttgagcaaaatactcttttcttttttcttttctttttttttttttttaagatggagtcttgctctgtcacctaggctggagtgcagtggcacgatctcggctcactgcaagctctgcctcctgggttcacgccattctcctgcctcagcctcccgagtagctgggactacaggcacccgccaccacgcccggctaattttttgtatattttttagtagagacagggtttcaccatgttagtcaggatggtcttgatctcctgacctcgtgatccgcccgcctcggcctcccaaagtgctgggattacaggcgtgagccactgcgcctggccaaaatactctttttaatggtttaatgagagtagcctagagtttatttttaaatggtagaaatgttgctaagaatagggtaggtttatatacttgctatacaaactgtggtccctggagtcgcagcatcagcaacacttgggaatccgttagaaatgcagattttcaggcctcacccagacctatggagtcaaaatctgccttttattgaggtgcccaagtgatttgcaagcacattaaagttcaagaagcattggtctatacaaccttcagtctttcaaaagtgtgaaatttatttaagcatttaagtatacctttcctactttgctcttcttctcctttgtaaaatgtattgacagtatgcttccttttgcttttaagccatttaagtgtctagaactttaatgataataatgaagagggctgttgtttacaaagaaaacagtaagaataggatgaacaccctagattcccataatacatcccccattcaggggtagcgatggacgaagactcaaattcacatgataagctgctccattttggcatgaaccagtttttaactctagccagtcaatttcgtttttaaaacttctcccaggagaagaaaaaaagtgatagaagaagaaaccatacttagaaatgcaaactattcaaggaaatcttgactttcagtccttgtaaatactgaacaaaaggctttatctttcacaagttgaagaaatattaacatgctatgggggtgtctttcctgcgactgttttgctggctctgggcccggcatgaatttggtagtactgggcaaggccacagctgcatgccggcctgcattgcatctctatttttgcaggcattaaatagcttctcccatctccaacatgtgttgctgcacatgtgacccaatgaatcaatcccctgtacaatgaagcaacaataatgggtctggggcaattagcacagggacagcaggtcttcctagcagactcttgcccacgttaatattcgcagcatatcctgggtgggtgctcctgagaattctgctaatgccccattaccatcctcagggctggtaattgcaagggtagagatctgttgcagcttctgggcagccgttcccttccttcccaagatgaatgttgtgaagggcaatgagggggttgtgagtgcctccaaataaaggtcttttatagctctttaaagctgtaagtcattcagtcatagtttctttcacctgctggcttgacaactttaaaaatttacatttctgaacttgtactttaacaggctttcatcataacttcgggaaagaagaattagaatggggaagatttaggtgcacagatggggtcgaaatcaggataatattgactaagcaccctcctggggctctcctaacacaaacgattaccctgcctcctaggattttatagttcaaatagaataggtgagcactaaaacaatcaaatctgttatcctgaaaggccaaattggcaaagtrgttcctagtgaaaatcatggaatattagccctcaaagatattttaaagcccacccctccttttttggtaattgtctgtgaaatgaggatcttacagaccctgcctcatcacatggcggcgaggaccaaattagacaccctgggagcttgcaatggaaaagtctttcatgtctgcaaaggaaaataatgtgtgtgtgtgtgtgtgtgtgtttgtagataggtaggtaggtaggtatgtaggtaggtaggtatgtaggtaggtagrtagatagatagatttttttttttaagacagcatctcactctgtcacccaggctgcagtgcagcagtgtgatcttggctcaccgcagcctcaacctcctgggctcaagcaatcctcccaccttagcctcctgagtagctgggaccacaggtgtgcaccaccatgcccggctaatccttctggtagagacggggttttgccatgtagctcgggctggactcgaactcctgagctcaagcaatctgcccgcctctgcctccaaaagtgggggatggaaagcatgagccacggtgcctggcctaatatgtgtatttttaatgatctttattgttttaagctgaaaaaatagactcaaaggagtcaagtggtaacaagacaagagctcccttagaggtgctcacccacctgcatgctaaactgtatgaggtagctttcctcttgggctgtcagtgctaaagatgtgtaataatgcagaatacctgtactctggactctcactagagaatacagctttgaactccctgctgttcaatcccttagcaaaatactgatttttgagaaataatgtttgtgaagaatcgcctgaaggttatgcaaattctccactctgctggatatcctaaaatttacctatggatcaaacctgattgtcagggcactgtgtatttggatcccaggtatttgcctcctggtagtagtaacttgactgaactgtgcttacatgaaggggtgtgctatcagacccaactgtaagaaatgcattattatattcaacacaaggattttatggagaacctgatctgatggattgctagattcctctttatgaggactcacagtgataaatttccttggggctgcagcttcaggagaaacctggcttctactaaacaactttttaatcttatgattaaagtatcagcctcttccctctttgctctggccactaggaaacttggggccaaatttgtttatcaaatggattccattgctctgtaacaatcttggttttaatgttcttaccccctttttccctttggcaatttgttttatctatgtagttgcctaccttttgtaaatcgacttgtttttaaaaattaattatccctagctacttgggaggctgaggtgggaggatcatttgagcccaggagtttgaagctgcagtgagctatgactgcaccactgcacactacagtctgggcaatagagcgagaccctgtctcttaagaaaaaaaaatcaattttgattacttcataaatttcagttgaattgagtctctgacatcattttccagtgaagccttgaatcagtctttaagcaaactattttcatcagctggaccttggagatgacactcaactatgatttttcagaggcatgtgttaagtcatgaatgcaaaccaatcacattttcaagtctctgaagttggccgattttcatttcagaagacatatttagctttgtaagatctcttaaatttataaacagacattgaagggtaaataggcacttgatctttgatacatagttcttggactcaccaacaagcaaaacaataatatctcagtccgttgagctgtatcatttgggttttgtgacaatttggacaaagagtggttgaagtttactctttgctctctgagtatattaaacaaaagagtttaaattgtaagaaggaatatctgaatattaaagagctatttcccaacagcttttattcctatttgcatattaaaatgccattagattatctttataatctagcactgctctgattggtactttaatatgcctattacagacccttcctatttgttaaattaatatttgattactataatttcgaaggaaatccattcttgaatgtcataaatatgtactcttgaatcatatcctataaattaaaatatttactaatatgtgtggtcttgaaaatcattccaaattcctgaaatcactctgaaatgtaagtaatacatggtatgtgcctttttgaaatatttggaaatgtgtctgcttacttcttttttgaaatgacccctttcttgaattctggaatattgcatcctctttcttttagttctctctctgattaagcctttgtcctgtttgttgttgttgttgttkttttttgttttttgttttgttttgttttgtttttgagacagaatttccctcttgtcaccyaggctggagtgcaatggcacaatcttggctcactgcaacctctgtctcccaggttcaagctattcttctgcctcagcctcccaaagtagctgggattacaggtgcccgccaccatgcccacctaatttttttttttttttgtatttttagttgagacggggtttccccctgttggccaggctggtcttgaactcctgacctcaggtgatccacctgcctcggcctcccaaagtgctgggattacaggcgtgagccaccacgcccgaccacctttgccttgttaaacatttcttcctcttcacacccctaattgtgtgattccccaaattcagcatttcttccttcatgctgacctaggataactaaaccttcttaaagtatcaactatcattcttaacagatgactctgggacctgaatatcacttgagttccaacttcttagattacccactggatacttctactgtcacctcaaattcattgtgtcaactattaatcattactgttcatttcatgttagtggcatcaaaagacttagcaataacaagaaaacttttatcaattatatactacatactacaacggctgctttaaaaacaaatctcacttaatcctctgaaccatcttataggtgagttttaccaccttcactttacctattaggaaattggaaataagagaggtaaagaaagtatacttgtctcacagcaagtatactgcaaaacttgaactcaagtgtcatgttaagtggtctcccaaaaattatatctaaaattaaattatttttattttctctgtaacaaactttcttcttgtatgcctatttttgcctatggtaccgtaattctccttcatatggaaacttgaaattgtgaaggtttttccctcctccttattatttctcctgtcaaatccatctgtaagtcctgtaatattgcctcgtcctgattttcctttcttccttcctctagttcacacacttacccattaaggtctccaataaatctctgccctctctttctgcttttagctccttgcacattctcctcccctgaatggccactgaacaacctttcagaaggcagcagttgccctgtcctctagttgaccagaagccttcagctgatacaatgtcttaaggtcctttccctgacagtctaagctttccacatttcgactccaacctacttttccaatagctgataaaattcactccactcttttgctctcttcacactgcttggaataggcattttactttctgccttctaaactttgctcactcagccttgcctctcaaaataaatatcctcccacctctttcccttaaaatgtccaactcaagtctctgagttggctctgtggtttttactttcctctaaagtttacctactgtatttattatttgtgttactcattcagcagaagcatatgttgccctgtgtagtaattgtagtaattaaaattatcgtgtgtrtgygtgtgtgtgtgtgtgtgtgtgtgtgtgtgtgtatcttgcctccttggtcagattttaaaattcctagagggcaaaatgaattacaaccatcttctacatctctcagatgtttgaaatgagtttacatgtaaatcattctacaaacaatatagtattcaaagaaagcaaattactttgatagaggcaacagggtataataaaaagaacatgggttttgaaattaagaatatatgaattccaatccaatcagctgtgtgaattcagtcaagttcaaattttttaataatatgggttacttttgtcaccttatagcttattgtgatgttcatagcttattacaagagaatttaggccaatccctgccatccatgtatactgaaaagcaaaactattgtggttatttgatgactgaagggtatcactgtcttttcaagtcttgtgtgagcataagtgattggtatgagtcaccattgtacctataactgattgacatgaataaatatacagaatataaactccaactattttttaaaagtttgttggatatttctgtatttagaaatataactttagtgttgaaatagttgtcatctaaaccaatgatgcccaaacacaggtctgcaagaaaatgagaaaaacattattataatgagttttttggttaaactaagtaatgcaattgttaggattattctgtattttgcaattatgactctcctactttttgtgtgggttaacatttctttgctttataaaacaatggtcatgatacatggtagaggacagtagctgtggtttttgttatttctatcatggcttttcttaacaaaaccaagttagcaaactgatgttcatttccacaatagctttgaaaatgtcacagatccatattacctcaaatgcttggaaaccataatctagcccaagctctttgttttagagttgagaattatttgacttacagaagttaaattatttgtccgagatcatgtaacttactactgcagacccaatatgagaattcaactctattaactctcaatgcagaatatgcctcattatttaagtgaaaaactgtcttttctacaaatgaaaagaaaactctatttttcrtataacttttgaagaaaaggcattgtgtaaattttatttgctaaaaataattttattaagccaggtgtggtagttcatgcctgtaatcccagcactgtgggaggccgaggcaggaggattacttgagcctaggagttgtagaccagcctgggcaacatagtgaaacatcatgtcaaataaaaataagtaaataaacttattaaaatcctcccaaaagatggctttatcactaaatgaaagaaactggatgataaactatacatctgtaaaaattttttaaaaacaagtttcctaatttkttaatttcatttttttctacttattttcaaacaaaattaacttttattaaaaatatctttgtggcctggtgcagtggctcacacttgtaatcccagcactttgggaggctgaggcaggtggatcatttgaggtcaggagttcgagaccagcctggccaatatggtgaaatcctgtctctactaaaaatacaaaaatagcaggatgtggtggctcatgcctgtagtcccagttaattgggaggctgaagtaggagaatcacttgaacccaggaggcagaggttgcagtgagctaagattacgccactgcactccagcgtgggtgacagaacaagactcatgtcttgaaaataaataaatatatatatatatatatatatctctttgtggccagcacggtggctcacatctgtaatcccagcactttgggaggcagagacgggtggatcacttgaggtcaggaattcgagaccagcctggccaaagtgacaaaacccatctctactaaaaatacaaaagaaattagctgagagtggtgacaaacacctgtaaacccagctacttgggaggctgaggcacgagaatcgcttgaacccgtgaggcagaggttgccgtgagccgagatcatgccactgcactccagtctgggcaacagagagagactctgtctcaaaaaaacactttgtgtacctgaagattctggaaaatataagaggaaggaataaaaaccctataattctagagaaaagtcacaattgacactttaacatagttcctgctacatatttttcgatgtatatttttgtacggttgaaactatactacatatttcctgattcttcattttacgtatttattttaatttctttaaaatatgtaatatatttacatattttaaagcttggaaagaataaacagacatagagtgaagaggctctttctgatctttctacctcaatcacccagttttctttttctttttttttttttttttgagatggagtctcgttctgtctcccaggctggagtgcagtggcacgatctcggctcactgcaaactctgcctccccgggttcacgccattctcctgcctcagcctcccgagtagctgggactgcaggtgcctgccaccacacctggctaatttttttgtatttttagtagagatggggtttcaccgtgttacccaggatggtctcgatctcctgaccttgtgatccacgcgcctcagcctcccaaagtgctaggattacaggcgtgagccaccgcgcccggccaatcacacagttttcttcctaaccaaaattaatacagttgttaaaagttttcatatgtgtatctttccaaagagactttgtgcattttattcagattctttaccttaatattaaaacagattcactttccatcttatttaaaatcatataaaatgtcaattttaaggcccacataatattttactatacagatataccataatttgcttagtcctgattatctatcagacattaaaattgtttccaacttttgagttttagcaactttgtagatcctagtgcttaaattaaaagagcccattgatcttctcattttagaaattgtaggacttggtgggtgcagtggctcacacctgtaattccatcactctgggaggccgaggtgggtggatcacctgaggtcaggagttcaagacccgcctggccatggtgaatcctcgtctctacttaaaatgcaaaaattagccgggcgtgggggtgtgtgcctgtaatcccagctactcaggaggctgaggcaggagaatcgcttgaacccaggaggtggaggttgcagtgagccgagatcacgccattgcactccagcctgggcaacaagagagaaactccatctcaaaaaaaaaaaaaaaaaaaaaaaaaaaaaaaaaaaaaaaaaaaaagaagaagaaagaaaagaaaagaaagaaagaaaaaagaaaaacaaaagaaattataggacttttacagtaattttccttgaagagattagtttcattttacccctattctcaaaagcaagtctgttgtttttttctgctaaggctagtccatcaacctggggttgaaacaatcctttatctccatgaactgacctcagtgagttacagccacatcctcttatactttggaaagaacatccctcagctcagtgttccataaatatttatagcaggaatgccccagtccaaagtggatggcattttgacctcatcattgttgctgactccctgtatcctgggagcttagagggtcgaagcactgttgtttaagacaccctttggagctcccccttgaaagcaaagagtagttatgcattcaaacatacccaaggaatagcacagcaatacaaaaaaaaaaaaaaaatgatgacccaagtagaaagtatgcccaagaataaataaatgttgatgctgctttcagaggactgtgagagttgatgggctttgtgctgaatgctaaagacactggttcatcatggattggtcagaaaagagtttgcctcatttagaggaatattcgtggagttggtgatgaatagagaaaggtgaggaaggcttcccgaagcagaggagaagccatgaatttgttgcctagaaaaaggtctatgtgaaatagagctcttcagagtgagaaatctggacctacgctatgaggaaattggcataaaaggaccaagargaagcctgacaagaaaggaaaatacttggttaaaacaattgcagtagaaagggagaaatctgggcttaatatagatagaactgtcaaagataagagtaactgccagaaaaccaacaaacaaaacyagataaatcagtgagccttctgggatttttttttttttctgggattctctctcaaccaacccaactcccagccgcatcccaacccccgtagataaagtctattgtccttgtcctattccttgtagtggaaatttagcatgttctcaatttgatgcaaagtgttacgtaactccaggatccagcccactcttctgactatatttccaactatgttataatattactctaagactctcttttatagaaatgttcaaagtaactgtggcaaaattgtttttgctcccaactattgtacacacttcataaaaactatttctacaacctgagagccagttgagataagctcttggcggcagataaagaccaagattgagcactctccagttacatatgtgttaaacagatctttaaacatatcctttcaaagctgtatctcgagggataatttaatataggaatataaggtaccatgagagggtcaatcacagaaatatttttggtgagagtgactttccccatgatttttttttccccagactgagtcttgctctgtcacccaggctggagtgcaatggcacaatctcggctcgctgcaaactccacctcccgggttcaatctattctcctgcctcagcctcctgagtagctgagattacaggcgtccgccaccacgcccggctaatttttctatttttaatagagacagggtttcaccatgttggccaggctggtcttgaactcttgaccttgtgatctgcctgcctcagcctcccaaagtgctgggattacaggcatgagccaccacgcccggcccactttccccagaattgttaaaggtgactacttatgtggtagtattcaaatacccaaagaccacctactctaattagcaaaataagctgtatttgtattggtcccattctttcattattctcaacmtgtttcctctctgtaagatggaaataatatctgttttatagaattgtcataaaggttaaatcagatttccagtaatggcagactaaataagtgtgattgagcttcctgctaaggacaactaagaaagctgggggaaaagcatyttaagaatctgattcaaagcagtagagaactaataagatgtttaaaaacactgagctagggtggggaagcttggaagcccatggaggtgagcccggagtttctgtatgtttttcccctgtgagcaagaccagaaggcggagagaacaacatgctgagttatgattttgaaagccacaaagatctaaggtgacagggattggtgctcagtttccatcaagggatgggagtcctggtggatgaactcttctcacactggattaaaactctgaaggaccttaaggaaaagagtaattcagaagtaagcacccctagagactacagcttagcttttaattctttcaagccatgaaattgattttaggtgacattttagtgtttgagcacttaggcagctggcaggaacaaacatatcctctctggagaaatataacatcatctcagacctcaaatatatttctacattttgtagatccaatatctggcacataataaaaaataatcagacacacaaggagtaaaataacatgaactaatatcaatagatacagcagacaatagaaacagacctacagaggctacaggtgttagagtttgcacactgacttcaaactaatgatcttattcaggtcaaagagattaaaaaaaaatccaacaagattaagaatttcaaccaagaacaacaacaacaaaaactcaataacaaatcaaaaggatattccagattaaagggtaccaaaaaaaaaaaaaaaaaaaaaaaaggtttaagagcagatgagacacaattaaagcaagaatttgtaaaccaaaagatagatcaggagaaagtacccagaatgtagtagaaaaacaaaataatagaaaaatcagaaatgataatacaacrcataggactgtagtgaaaagctgtaacatacgttcattggaaactcagaagggaagaagagactgaggtagcagcaataataagagataatggctgacaaaattttgcaagctggtaaaataattcaaagactctataaatcctaggaaacccaaccaggataaatacacaaacgaatacctaaacacatcatagtaaaactgctgaaaacccaagacaaagagaaaatggtaaaaatagcaagagaagaaagatagattaccttcaaaggagcaaaaatatagcagatttctcaatggaaacaattgaaagtaggagactataaaatatactaaaagcactgagcaaaagtaagaaaattgccactgaaattctataccagctgatatagccttccataaaaaggtaaaataaataactttttagacaaactaaagcaaatattagatgtttttatagcagaaggaaaatatccagccttggagatacagtaaaaacaaaacaaaacaaaaaaaccaaaggacaaaataatgagttaaatatgtaggtgactctaaataaatattgattgcataagycaataattataataatttttagcaattaaaatgaagaattaaaacacaaagcaacaataaggatggaatatagaattagtggtgttggaacatgggtcagtaggacatggaataaatggtgtaaagtgttctaagtttcttgtccaggaaaaaaataaaagtattggtattacatttagttaagaaaaagacacacttaatatttagggttattactgtatatattttaaaggaatatatggctttccaggtaataaggagaaaaataatagaataatttttttgtagggccaggcgcggtggcttacatctgtagtcccagcactttgggaggccaacatgggcggatcacttgagatcaggaactcaagaccagccctgtcaacatagtgaaacctcatctctactaaaaatacaaaaattagctgggcatggtggcgtgtgcctatagttccagctactcaggaggctgaagcaggagaatcacttgaacccgggaggcagaggttgcagtgagccgagatcatgccactgcactctagcctgggcaacagagtgagactccatcccccaaccccaaaaaagaaaaatttgttgtaaagttctcaatcagtctggaacaaatcaatgaaggaaagaaaaagaaacagaacaagtaggaaaaatagaacatattgaataatacctagaattatacgtagaatcaaaattacacataccagtaattactttaaatgtaaatggactaaatatcccaattaaaagacaaagattatcaaactggattaaaaaataaaagtgttaattgtaagagacatgtaaaacttaagaatccagaaagtttaaaaaacacatttggagaaagatttagctatcatacaaacacaaaagaaatttggttgtaggttttttttcattttttgttttttgtttttgagatggagtcttgctctgttgcccaggctggagtgcaatggcatgatctcggctcactgcagcctctgccttccaggttcaaaagattctcctgcctcagcctcctgagtagctgggattacaggcgcacacccccacgcctggctaatttttgcatttttagtagaggtggggtgtcaccatggtggtcaggctggtctcaagctcctgacctcatgatctgtccacctcagcctcccaaagtgctgggattacaggcgtgagccactgcacccagtcagttgtaggtatcttaatatcaaagtagacaatgtaaaaagcattattggtgtctttataatgacaaaatgcttccttcaccagatagattataacaattttaaacttgtatgtacctagaaacatagtttaaaaatatgcaaagcaaaaactacacagaaaggcttagacaaattcatagtcatgttgggatattttaatgcacctgtcccagtaactaatagaatatttgaacaacataaacagtaaaatacagcaaaattaaacacacacacatatatataatagagagaaaacactgcataacaactaaaaaatacatagtcttttgaagtaccacataaaatatgtataaaacttaagcaattttgtgacataagtgttaacaaattttaaaggattgaaattctacagattatattctttcactacaatgttattaagccagaaattggctgggtgtggtggctcacgcctgtaatcccagcactttgggaggtcaaggtgggtggattaactgaggtcaggggtttgaaaccagcctggccaatgtgacgaaacccatctctactaaagtacagaaaatcagccaggcatggtggtgggcacttgtaatcccagctacttagggaggctgaggcatgagaatcacttgaaccygggaggcagaggttgcagtaagctgagatcgcaccactgtactccagccttggtgacagagggagacttcgtctcaaaaaaaaaaagacaaataaaaataactagaaaatccttattttttgaaattttaaaatatctttctaataacatgtggctcaaagaagaaaccacaatggaaattataacatattttcaactaaataataataaaaatacaaactattaagacttgtgggatgcaggggaatttataggttttaattcatacatttgaaaagaagrctgaagatcaatgaacaaagtcatcttttttgtttcccgtttttttttttttgatacagagtcttgctctgtcgcgcaggctggagtgcagtggcacaatctcagctctctgcaacctctgccttccaggttcaagtgattctcttgcctcggcctcccatgtagctgggactacaagtgcatgccaccacacccggctaatttttgtatttttagcacagatggggttttgccatgttggccaggctggtctcgaactcctgacctcgggtgatccacccaccttggcctcccaaagtgctgggattacaggcatgagccaccatgcctgttgaacaaagtcatcttaagaaattagaaaatgaataacaaataaaacaaaggaaataataatgatagaagtgtaattaaatagagtagacataccatacaaagaaccaaaaaagctcaaaattggtattttcagaagactaataaattaatatacccatggcaggactgataaagaacaaggagagaaatgatacgtattttcaataattaaaatgggaatattattagagatcctacaaatactaaaattttatgaacaattttatgttattaactttgaaaatttagatgaaatggacaaattgacacagaaagaaatagaaatcctgaatattccttttttgtttgtttgttttttccttttgagatggagtttcactcttgttgcccaggctggagtgcaatggcatgatcttggctcactgcaacctccacctcctgggttcaagtgattctcctgcctcagcctcctgagtagctgggattacaggcatgtgccaccatgcctggctaattttttgtatttttagtagagacagggtttcaccatgttagccaggatggtctcgatctcccgacctcaggtgatccacctgcctcagcctcccaaagttctgggattacaggtgtgagccatggcgcccggccctgaatatttctttattaaagaatttgaatctataatttaaagtcttccagtaagaatgctccagacccaggtggctttataagcaaatgcatacaggtatcaaaagaagaaataatggcattcatacacaaactaaaaattggaaaagaggaagtacatgacaacttattttatgagatctccataaccttgatattaaaatctgacaagaggccgggcacagtggctcacacctgtaatcctagcctttgggaggctgaggttggcagatcatttgagttcaggagctcgagaccagcctgggcaatctggtgaaaccctgttctccacaaaaaaaaagttggccgggcatggtggcgttcaccggtagtctcagctacttggggggagctgatgtgggaagatcacttgagcccagaaggttgaggctgcagtacacaagatcttaccactgtactccagcctgggtgacaaagtgagaccctgtctaaaaaaaaaattaacaagaaagaaaaatttcaggtgaatcttcctcatgaacatagattcaaaatcctaaacatattattagcacaccaaatttagccatttatgaaaaggataatgcataaaaactttatttggtttattccagaaaaagaaatttggcttaaaattaaaaataaatatgtcaatgcatttacaaaatgaaggaataaaatcatttgatcatttcagtagatgacaaaattcaatattcattcatgataaaaaaaaaaaaagtttagaaaactaggatggagactgggcgcagtggctcacacctgtaaccctagcacttcgggaggctgaggcaggtggatcacgagctcaggagtttgagaccagcctgcccaacatggtgaaaccccatcactaccagaaatacaaaaattacccaggcgtggtggcgtgcgcctataatcccagctacttgggaggctgaggcgggagaatcgtttgaacccaggaggtggaggttgcagtgagctgagattgtgccactgcactccagcctgggtgacagagtaagacaccctcgagaggagaggagaggcgagatgaggggaggggaggggaggggagcagagggaaactaggatggaaaggaactgccttaatctaattaaataggcctacaaaattccttcagcaaatatcatccctaatggtaaaagctttccctctgtaataaaaatcaagacctgrtatccactttactcaatgtcatattggaggtcctaagtgcagtgtccctcactttataggcatgctgcatatgcagttggcatcagcgaagcaggtccaccaaaactttattttgaaatgatttgatatctaaacaaaatgtaaaaacatcaaatttaatgcaatattgcaataattccctaaccactctcctccaaccactttctcttcatagagccaaacttttaaaaaatataagtcagattattgatgaagagacccaggacctggtcatgagctaccagatttgcctgcctctccatcccatcttatgtctcccttcctgttgtctgcattctggcttcaccagcattttcagagtctcaaaggtgtcatgcaacttccacatctaggcctttggaaaaagccctttcctaagcctgggaccatttccaatgccctcttcacctaattcatcctttagattttagctcgctagttcagggacaacctaatcacaaatagggaatagcctcagtcacaataaacacatctaacacccagaacttgctttctaatatgatttttcaacaaagaggaaccaaggctccttggagaaatggttgattctaggactggagcagaaaatatwcaagatgagcctgcagcatcttacaatgccagaaagtaaggaagtgatcaaaatatacaccgcctcatgatgagagtatgtcaaagaygcacagaagtcaactgaaagagctcccggtggccaaagctagagaatctgatcaaggaaataaataatgcattatggattataatccagggtataaaataatccatgagtctcaattgatataaaaaatgaataaattaataagtgggggagaagagagaaatctcctatgcagaagaattgtagatactttttgtagacactctgccctcgaggggaaacataatcctcatttcttaagtgtgggctgctcaaagtgactcccttccaaacactacagtatggaaagggacaggggctgggagtggagaacagtawgttttcagtgcagaaatctgacaagcactgtatttgctaggtgatcaaggtcaacatcagcagtgaagtcatgttgatcgtaggtatccttgatacaatgtgatgagaatggcattttacctctgtggtcttcctcccccaaacacaaaagcccagtcaaatcatatcatgagacaaatatcagacaaattccagttgaggacattctgcaaacgtttcacaaaatgtactcttcaaaactgtcaaggtcatcaaaaacaagaaaagcctaagaaactgccatagccaagagaagcgtaaggagacaggagaactattaatagaggtaatgcggcgtcacagatgggatcccggggcagaaaaaagaaaattaggtaaaaactagggaaatctgaataaagcgtgtattttagttaataatactgtatcaatattggttcactaattgtgccatgtatacctgactaaatgtaatggggaaaactgggtatgggaactctctactatatatgcaatttttctataaatctaaatctgttaaaatctaaatctgtatgaaaaacatcaacaactaaataacctctaaatagtgaatagaatatggtatccctcctacttctcataaattatttaaaagtctgccaagtattggtctgaatacggaaatcatattttgcttaagctggggagtgggtacataggccttgttgtatttttctttatgcctttttgcatatctagtatttcattttttaaaaygctaaatgtaaagcaattgcgtaaaagtcaaaatgttgatctctcgcatgatggctacttagttttaaaatatcaaattatttgaaaataatttttcaatgattctgctttgctggtacccaagcatgtccagtgtgcccacggggtgctgggcactgtctctggggaagcagcaaaccagactcatctctaggtggcctgggctcaacagcttcctgccattttctttgattggtagttaagacttttttgttgttgttttgtttttgtttttgttttttgagacggagtctcgctctgttgcccaggctggagtgcagtggcgcgatctcggctcactgcaagctccgcctccagggttcacgccattctcctgcctcagcctcccaagtagcggggactacaggcgaccgccaccacgcccggctaatttgkgtgtgtgtgtgtgtgtgtgtgtgtgtgtgtgtgtgtgtgtgtgtatttttagaagagatggggtttcaccatgttagccaggatatggtctcaatctcttgacctcgtgatccaccagccttggccttccaaagtgctgggattacaggcgtgagccatggcgccgggccaacattttttttttcctgacaacttaatgtctatctatcctaatagattgccagctacgtgagagcagggatgattgtatgtacattgagtagcaaggtgcctggcatacaataaatggtcaataagtatttattgagtgactataacttaatgattcaaaacttagaccctagtgttacctggacctgatgaagtttagcttccccacttactaggaatggggtcaataaaaatgcccactccaaaggcgctttgtggacgaatgtgcttacttattacggttctttgtaaatgttagctatgatttttattaggtgcttgctgaattaaatagcttaatatttgtaaagtgcttagaacagttcctggaacagggtaagtgcttcttgtttgtgtttatttattatttttttaatgttgctgttgaccaaattaaacttcacattcattttgtttagtctgttagggatattctttggaaaatcttctacattgtgtggaaagataaggcctaaaatgcatactattctgattcgttcaaaatatatcactctgggatatgtgtaattcagaaaggaacgtgatctgaacacttctgtagtagttatggagaagtaatgtgtactacaaaaaaggaatcattaaatcatttaagaaaattgctgtgcactacagcaatatcattcatagataattaacaatccacctttgcaggggtttgttacctggtttcaaaacattggcttttaaacttcttgccctagctcaaaatgtaagaaatacattttacattatgacttagtacacaataatatatgtgcgtgcatatataagcatatatatacatgcctaaatatttgtgtatatgtataatggaaacaaaattttactacacaatggtcattcctagtaaagtgatggatgctctctaatactgtttctagttccagtaggtgagagggtaagagaatttgcacttttttttttggcgggggggatggagtcttgctctgccatccaggctggagtgcagtggtgctatctcgggtccttgcaacctctgcctcccgggttcaagtgatcctcttgcctcagcctcccgagtggctgggattacaagcacatgccaccacacccggctaatttttgtatttttagtggagatggggtttcaccatgttggccaggctggtctggaactcctgagctcaggtgatccacctgccttggcctcctaaagttttgggattacaggcgtcagccaccacgtccagctgagtgtttgcactttgaacaagtcccaaggtgatgccgttgctgctagtttggggaaccacactttgagaacttctacactagacaatactagtgattgaaaaaaaatcaagccccactaagcgcctccaagtgctggtctggccccaatcttccaactcatttacactttgctttagattcaacatccacctgctcctgggataattctgggttcccccacttctggtgggtcttgtgtttctattttccttaccagtcaaaatgtccacactcatctcttgcctagttgttctctctctctctttctctctctgtctagaaatggaaaggtaaagacgatactgggatggtctgacttgagagacaaatgcaattaatcatcacaataattcaagggaaagttaaacagtacttgctgtttttttccagggatccaaaatgagttagttactgccttggcataaagtcaaccaaaattatgggaatacctgtgcctatttcctctttatgatttttggtctttttgctttccaaaaatggggtaatgtataaaattatcaatgaaaaacttccttgctcttgctcattactttaatcaaaaaaagttcaacaagtacatattacaaggattctcttggtagaacaccattagctaaatagaaaaaggaaccgtacttaaacactaaatctagttgaaaaagcaaatgatccttaattgtagattgatgagctccggccagtgatggtatcacagcctaagatgaaattggtgaaatcaaatgttaagagstctcagaattggcatcacgagggcaaagagatgaaacaactagtgatatctggccaaggagcagcagtgtggcagctggctactggcttctatatgaaagagagaaatggtacctacctgggaccaacatggagggcggcagggagaggctgcccctcgaaatggggaaactgactgtttgggcagggaaggcaacagtgactgaaaaaaggaatcagctgttattggttgaccagaaaaaggtactggtatccactctaagcttttagggaaggaagaactggttggctcccagttcagacaaggcccctaacatctgaattaatcttataaatggttctgtatgcttctttcttttgggtctcaggtttaaaatgttctttcttttgagtgggtgattgagatggaaattccaccaagttttctggagtagatactctatgacaagaacggcatttaatttcccttcagccactgtgggtttaaaaccaacaaacttaggtcgcatcttcataaaaatcacaattaaattttgggttatggaggaggtaaccaggatagaatatgctttgggggtacaaaactgttgaagggaatcattatcagtagcttttcacagctacccaaccataaaacgcctttggctytgagaatagtagtagctagattttggcttcttttgtttttttctgtcccatcccccatctccccttggatgcctttggattcaaatgtagatgaaatgcagattcttgggagaaaggaagacatgcctggtttggctggtgattgggaaaagaggaggatctcagatttcaggttttagttatcattctcccgagatgggaagaggctgtgattcttgatctgaagagtcttatcgtcggtagaacttgccatcgatgatcaattgtttggatttgaggaggagagaattgaattatgttggcctacaacaacgggagcaggtcaggtaagaatcgtttattgctggtagacgtgtcttttaatcatgtgtgtatatcgtctctcttgttgaccacttctctaatcttttaagagtcatatgtcttactagtgcatggtattgtgctgtatgtatttttgctgcaatcttcccggtgtgcttaggggatgtgatttcacttttattcttaagccactgagaaaataatagcacccacacacgtggtcatggaaactacagaacttcactgtttcataaaaggtggtggaaattccaagtcattaaataatcttgggcatatttacttctgctatgagtgctggtaaaatgtttatataaaaaagtgacggaggaaagcaaagtttgcttaaaagtaagacaaattgaacgaatgaggttaaaatatatatgtatatataagcaaaatagcattccataaatcagtgagttttaaatggagggcagatgaaaggaacaaagtggacaattgagaacttcctcaatttctcagtcgctaggtggatacccatctccttcgccagtggaagccaactgtcagagtggagaggtggttggaacttaggagtatggctcactcctgctttgttttagaggctactggtggttactcttaatgttgtagactaaggatagcagcataaacattccagattgtcaagattgaaaagctacgtaaattgacaaaggtctatgtaaattgacatttttgagttgcctttttgaggctataattcttcccctttttgtttccacaatggggaaaatcgccttactagctcaatatctggatatgtttgttgtggatgtctatgttcctttctttccctctcctgggcaacaatggcagttttggagactccttggagaccacagtaccattacgcacatggtggagccccttgtgaatgcctaagcttgtggatgttctgaagggggcaataattggagtaatggtcatggcgagaagtgcttgtatttgtattggtccatcattgcataataggcttatatgttatatgtatctatttcctattgaggatctcttttttacagttgatttttcttgagggattttaaactatcacctgccagtatttgagcgcttgccgaagtgtgcactcaatgctttgagatttcccaaatgtataaaatcctagtccttgccttcaaggaacttacaacttttgttgataaattggtaaacctagagagaaggcaacaatgaaatgcagcatataatggaaatgctaagtgagaggaaagaggcgctgtttggaggagggagagggaattggctgggccatcagggaaagaggcagagcttgaggcgccttgaccagttgatgaagtggtggctttaatttgcgattcttgtgcaaacatttgataatgggaattggatgtgtaggtattgggctttctcgtggacactgaaattccattcattgaacaacaccttatttcctgtatagagaatggtgctaggggccagcgtcaaatttgaagatgaagtctgactgaaggtcatcgtttggagttggggtggggtgaagagtagacaaaccttaaaatacagagacgagtgctgcagtgagcacgcgtgagtgcttaggcagcgcttgaagagggagttaccgatttggccctggaagtcaggaaggctatccttttaaggtgatccctgagctgggagtttgtttcaaacggtggggaccgcaggtagaagcaccgcttaaggggaacggcgattcgactcgcagtgacttaagggttggcgtggtgcttgttcctgggcgtggggaggacaggaaaccgcggggtctgtgagacgccccgtggttgttgaaacgctgttggggggcacaaacgaatagggctttaggaagaaaactggtgggaggagccttgtggctccaaggtaggttaggaactggagcgagatggagcacggaggagtgaggcggcccgaaggatgcccggggagacatggaggaactggcgagggcttcccgatgcagggcctgggggagagggtgaactaatgcctctgcagtgccccgtggggaagttccgcatactcggccagagtgatcggagttggcggctgtctgggggagttgggtcaggaagccccttctttcgccaccgatggggcacgtccagggcccggcaggtgtgccctggcagtagatcttccctgggaagtggagcgcgggccagccctcgctgttctgagcgagggcctgtcgtgtagtccacaccgttccgcgaaaggaaccaccattgacagcctcgttcgattagaacccggacctccctggaatccagactcggtcccytcccagctgcgcttcggaggaggcggacgctccgagaggaacccagaggcctggcgtggggggagctgcgggcagagcggaggcagccgcgccctcgcgccgccctccgccgcgcccggctcccgccccccggatcccacccccggcctgccgcggagccagcgtgccagccggagctcgccgggccaccccgcggggcgcgcggcccgggctccgggtcttggcggcggccggtggggcgggcatggggtggggtgggtgctccacctggccacgccgccggcccttcgcgggctggcccggccccggacgggcgggcgcacggaggccgcctcttgggctcctcctggagggaggcgcgcggtagacggcgcggccgctgccgtcggggcggtgggctccagacgcgggccggctcgctcgcatggttccctgccccatctcgggtccgtcgctgcccgtcctggtgtgcacaaccgcgctgcgcctcgaacctcgaggtccaggtcccgcctgccctgggccgggccgcaagcgcccacgtcgaggcgggctggggggcggtgccgcgggccaggccgaccccgcaagcgggactggggaagtcggagccccgcccaccaccccgccccccgcgctcgcggccccgcccccgactgccccgctcctccccttcctgccggctcgctcccggccccgccggccgcccgcctcggccccgagcggagcccactgctcccctcggctgccccgccccgccgccgccccgcccctcccgcgcgggcggcccgaaaacccggagcgcgggagcgcggctccgcagggccgggcggccgcactgggcatgctcagtagccggggcaggttttttggtcgcaagtaggaagctttctgcactacaccggagaggggagccgcgatccggccgcgccgcccgcacgccgccgcgcccgccccagcccgcccggccccgcggcggggcgcgatgagcccgagcgcgagccggcccgccggggagtgagcgcggggcgcccagggcgcgttgcgtagctgctcctgcgcacaaccccgccgcgccgccggcccgcactggccgcggagtgcaagaggctcgtccgtgcccagcgcccggccggccgcgggagcaggaagcgcaggccacgcaggacccaactgaaacaaagtgtcggccgcccggcgccggcgcccgccccgaccctgcccctcccgcccgcaactccgccgcccaccatggcttccgaggagctgtacgaggtacctcccctccccccggcctcgggccgccccccgcccgccgcccctcccggcccggccgcgccgcccgacggccccgctcgccgcccgcgcccgccgcgtcccctcccccgccgcggccgcagtttgctggacgggaaatgtgtgtgaggggagcccgagcctccgttccgaggggccccggccggggggtcctgaagttgccgggcgtggggtgggggggggggtcccagccgtggggaagtggtgctgacacaagtgacttgctcggactgagctcaaagtgctcttggcgtgggtcgtggaagtggtgcctccgttgccgctcggcggggaccgtgggcggtacggggggtggggtgtgggggggtttctggatcatttgataaagcatttgggagagggttttgcccctggtcggggggtggcggggagaagaccggtgcaaacgctttcgactttgctgttcgccaaagcgatgcaaaatctcgcaccgaaaatgctaaacgttgaccacatgctttaattaggttagcattgtggccagagccaggaaatttaaatttaacgctgatacaccgtcattcatttgcgccgcagcgttgcaaatgagaagggcatagccagaactgtaagttctggtcgatgggtttaaaccagcttcaagtttgagagttaccaatttggatctttagacatgttttgtatgtctccatgtaacttcttttgacgtatttcaaagtagacttcctgggagtacagaagtttggaaggctttctgttcttctggataaatgattctcttgtttcacatgtatttataaataagttcctaagagacttaaaacttgcgaagactctctagactcacctttatgatgcgtttagggacctgggtgttgagggacttaaggaagcatctgtaacaagtagagccctgtggccccagggatcctttcagttgtcttctcttatgggcgtattattgctgttggcatagaatagagctttgttgtctgcgatgttagtcttctagcaacttttttgttgctttttaagagcaagtgtttgcagaagttctcaggaggaagctgccatctgtagaattaagggtaaggttgttgcttctccttacattgtatgtggtcagtataccttagctggtactgaaaatgttccattcttttcaaccattttacacattagctgtgccccgctgtattcaggatactattttaggtcatttggggatgtaaaagaagaaaaatctccctgttctcaggagctttccttctaggaaggaaagtgttgtgtgtctggaagacacagaaatggaggctaggatgtttgaggttgaggtcttccaggtgaagtctgtacagggggaagtacatagcatgagggtatgggggattttagtttctacattagatcattctttggttgtttagtcatgagtgttcactcttggcatttgcttttatgagtatgattacataatcagttccatcagtggatgagagtagcaccttatacgtaagttgtatcctatgtgtgtaagaatgattctgaagacagcacatttcccattagtatattatgaactaagtttagttccttctgtgcttattctatatcttcaggtttctgttcctaacagaagttattaatgagtaacattttgtactaagtttgtgttcatttaacgtttattgaatgcttgccatatggaggtttcatggggaaatactgaggtgtgagaatggttcatgctttcaaggagtgtctgttggggaggaagtaagtatattgcaaataaatgatacacctgcacaaytgaacttttgattctgagttttattttagttttggaaaaaaaggtattatagaagtatagttcaggtgataaatttaagtatgtgtagtaaatatgtagtggtcagtatctttcaaggcaaaatttgtaacttttcttttacttgtaggcaacactgtgactatgttaccattgaaagttgacattgaaagttttgcatggcagttgagagcctagatttggagtcagacaacccagttagtgacttccaactctatcaccttgggtaaattagccttgaaagctcagtttcctcatctgtgaaattgggatcagtgtttcccttatagagctatgaagtttacatgagaacatatgtaaagcccaccctaaaattcccatggcaagcacccagtaagtgatgatgattgtatggtaactggcttaaaatgcctccctgaaacctggttttgtttctaaaggtatagagttgtattgttttcataaaggcagtattatctgtagggcagaagtgatacgcaattgtaaatgaacgcgatagtctgacaaggctgggaaagacactaagatgatgttttgtggccaagtcaagggttgttagttgccttgttttgtccagttctgcctaaactgaaatagaagttttctgtttggcctcaggctccacaaatctagagggatatattgacaggaggaaatgtgaagtcttgcttctttgaactcacatggtctggtaggaggacaggtctgcagtaactgggaacttgggtgagttacccaactgctgagccttggttttctcgcctaaaagaaatgtctccaatacttagcatggaacctggtatgtagtaataggtctttagtaaatgtttaaatggctattgaaactaggctttgtgaacaaaaaataaaggaacagatcctggaaaagatgggtagagcatgaaccttgcaaaatttgaagagttactattagttgaaggatggaatagatttactccctacttttccagctgctaggattgaggaaaaacggatttttgatgcggcgtaggttagaacttcatagttttcacaaaaagacaagcgtcctttacatcacgcttctaatgtaaagggccagataatacatattttagacttgtgggttatattatggtctttgttgcaaccactcagctcacctcatgtagtgcaaaagcagtcgtagactcctatatgaatgtgcgctgtgtctcaaactgcttatggatagtaaaattcacttagtatatttcatatcattttatgtgtcatgaaatacacatttgtgttttttttccaatcacttacaaatgtaaaaatgattcctaacttgtaggttccacaaaaataggcagtgggctggctttgccctgtaggttgttgtttgttaagccctgctgtaggtgatcaactgtcatagtctgtttaggaatctgggtttactcaagggttggggatgtatggaagttagacggtatttctaactttcatcccagctctagacttagagctggaagatctgggtggtaatcctccctcctttcctccttcctttcctttctttctttctctttttttttttcaagagtcttgctctatctcccaggctgatgtgcagtggcttcatgttgtcagctcactacaacctctgcctcccgggttcaaagctattctcatgcctcagcctcctgagtggctgggattacagacgtgcaccacccccgcctaccccccccccccccgcccccgcccccgccccggctaatgttttgtatttttagtagagacagggtttcaccttgtgggccaggctggtctcaaactcctggtctcaagtgatccgcccaccttggcctcccaaagtgctgggattacaggcatgagtcactgcacccggccttcccttgttcttagaagcttgttaagtaactcatcttgtacttgtcttaactatcctaaactttctcatcagtaaaataggaggatgataaccaaataattgaggcttaaatggcattagcgtgtaaaagcaattctacaaaacgttttccatttttaaagaggaaaaaaaacccatccaactctcaaaccatgaaaccaaacctgttttcccttcctcaagatttaggatttgaaagtattctataaactgattatatcaccagagaaagctgtgaggtcaagaggaccttaatttatttagcagtcaagtaaccaccatgagactttgttcacgtgggactgaataaggaacgtatgctgtagtaaaatggaataagtattctctttatttgtatgtcttaataattccttttttcctcagtagatgtggagttattcccttgagaactcctgtaatagttaattcaaatttcagtaagctctcaatgattagtcttgaccttctgagagaatatttatgttttcattttcaaaaatggaagtaagcttttaagaatgaaatcgtatctggtgtgtaaaaaattgttttaaagttgattagtttgacaggatgatcaggatttgcaggggaaggtaggtcttttgaatctttcttcctactttgcgataagattcctgctctctcctgtgcaccacaaggcttttacttacattgaccaaaagcagttgtgaataaagtctcaatctgtagttcaaatggaagtcacagagaccaggacacctttcatggatgttggccaagctaggtcagcgtatgttgtatatggtgtagctgtctgaaaagattggaatcaccaaaattagtaaagaaaaagagttcatttgacttcaggagttgatagtgaggcagtgaggtcaaacatgcatgtgtgttttgacaataatagcctatcttaaatgctctttttcctgtgagttgctgagaatattatttattcatttgccccagcagcagtgtggagacctctcatgtgctcttcctttgaactactttcaattcctgtgtaccagaatagcgtttttttcattcttgctgtgatatctaagaatcatagactgttccctcgtgctctataatgattttaaccacggagaatattttcatggtatgtaggcaacactttcttcgcattgttctggttcacagttttggataactgtgattcacaaagccaggcctcaaatgaattcttttgtaaataaggagtgatagtttttatattgtgagcactcctaggtggaacaggaccagcctggggtcttttttcaattcagattcttgaacccaaaccacgagattataattttcaatgtttggatggagacaggaatcttatgttccgagaagcttctttttggaatgcaggtggatttaggagcctctggatacgcccttctgtgtttcagacccttaggctctgcgtggaggtgggtgggggtgggttggggatctgcctggcggargaggagctctcggtggaccagactggttctttctgcaggctccttgaccactgctggttgttaactgagtaattccaggaagggaatattaaaaacatcaggtagttagctaagggcgttgtaatttctgttttctgtctttattgcctggcatgtttgtccaccagaatgtaagtgctttaaagctcagattcattttctggtcattattttccacagctcaaaatactgcaatcgttgcataattgttgagttactttaatggaagagtgaattacaggaatgaatctccattcctgactccttacttacctcgaggttcctcctcccctaagcattatgcctcttgctgttctttttactcttagttcctcatctgcttacatggtttcaactctagaatggagaatttcactgtttcccacacaaacttaattctcttcagccttttaagctgggcaaggttttggggttcacgttctctaggaagtctggggagggcctattatgagtctagatatgactttaaatccaattataacctcaaatagaattttatgaaaatttaaacaagtacatatgagcatatttcagagggagagaatcaagagctttcatctgattctcagagggatataggacccaaagcaagtattaaaaactgcatcgagacctttgaactaagacttatctgtggctgccctccacggaccactttgacattatttttgttgaactgtcctctgccacaaattacagtaaaaccatattaaaacctcactgattgggtttagaagttgtatgctatttctagtctttaagtggctaattttgcagctatgcatacatgatgtctaaagatagtcagtatttaatggcacttctgacaatgtaaagattttacattccttgaaccctggtgcattcctgaactcacatgctactgctttcttattgcccatgaaaaaatccctcatcaaatagaacattattattttatacaacctttctttagattcacctctgacttcatagtttcttcaatcagatcgtccatcttctatctcagaacttccttctgggatttttttttttcttaagtgtatcctttagagatttctttagtgagggactatggatggaaaagtttctaggtttttttttttwaattattattatctggacatgtctttattttgccatcattttttgaaagagaatagtatttcaaataaaaccagttaattggttaatttctttcagctccttctgaagatggtgctccattgtcttctgccttgcctttgcactattcttgagacttttttttttttttttgaggtggcgtttcactcttgtcgcccaggctggagtgcagtggcatgatcttggcttactgtagcctctgcctcactggttcaagtgattctcctgcctcagcctttcaagtagctgggattatgggcatgcaccaccatgcctggctattttttgtatttttagtagagatggggtttcaccatgttggtcaggctagtctcgaactcctgacatcaagtgatccacccgcctcagcctcccagagtgcttggattacaggtgtgagccacactgcacctggccaagactgttgtcagcataggtgcagtcactttataggagatctgtcttctgtctctggttgttcttgagatcatctctttgactttggtttcctcttgtttaatacgacaatgtattttgtgtgattttttattagttaggtgggtatatgttgtgctgctttttggatttgtgcctcatcagctcgaaaatggatttggccagtttgtcttcaaatactccttctctgtactcgtcaggaattccaagtagacatctatcagatcatttcattctctcttctttgtcttttaccttttcatttccatctccttgtttgtgttttgttttctttttatgtgctgcattttagctatttccttggatctaaactatagttcactaatgagctgtgtttaatctgctgttttattcaaccattgagttttaattttcaataattacattttttacttcgaaatattctggggagtttttacctaatctgcaattcgttttttaagtctttggtgtttgtccattttatgatttagtcattattttgggttgggggcagttactgaggcagctgggatattttccttgtttcctacaattgctatatggtatcactgttaatgagagttatattttattaaagatctagttaatttgtaatgagagggccctttggagtcatgtttgctttattgccagaatctgaagaaaccttcttgatttggaatttgtgacatgagcagggattgaggctttgaaccaacacttgagatttacctgatgatattgaaaatgcaaaacagtagttttcaagaggactgtttatgaaaatggattataatagttataacgcaattgcttctgaagcaaaatgttcaatgtctttgttcggcatgccttgatatatagtcttgtaccacataatgatactttggtcttacgatggtggtcccgtaagattataataccacatttttactgtaccttttctatgtttagatacacaagttgatatggtttggctgtgtcctcacccagatctcatttggaattgtagctcccataattcccacgtaccatgggagggaccctgtgggaggtagttgaatcgtggggtggatctttcccttgctgttctcctgatagtgagtctcatgagatctcatggtttgataaaaaggagttcccctgcacaagctctcttgcctgccaccatgtaacgtgtgaccttgctcctcattcaccttcctccatgattgtgaggcccccccagccatgtggaactgagttaattaaactygtttcctttataaattacccggtctcgggtatgtctttattagcaatgtgagaatggactaatacacaagtcctcactattgtgttaaaattgcctacagtgttcagtacagtaacatctgtacaggtctgtagcctggaagcaataggctctaccatacagcctaggtgtgtagtaggctacaacattgatgtttgtgtaagttcactctgtgaggttcgcacagcagtgaaattgcctaacaacgcatttctgagaacatatcactgtagttaagcaacgtgtgaccgtatagtatactttcttttttgtggagaggttagcttcaatatatctagagaatgtcttttatttactttttgtcttatttccatttgtagtaggctctctgctatgtgaagttttctttgttggtagcttcctagtgtttgttgttaaaacccaacaatgttgactgcacatcatgaatgttctttggttaaaatgtatccgtttttcacttgtacccatttttcattagtagtttactgtttaggaattcaaggcatcacatagttgcacacagaagcttttcttattttattaatagcatgtaactaatgtggatatcccagctctttagtgtatctcagaaccaggacaaaaaaagtcatcttagtttgcaaaaagatgcaccaccccatgcacactggacaacagctctgggtctctcttggagactgttgacatttcctttaggcattatgtacttggacttgactggcacctttagcatgttagaaacaggttatttggtaaaggaaaaggctctgccagaggcaggtgaattgacgttaataagtttgttcatgaagttcgctgaagagggtagctggtgatggcactccaagtcttgaggtgacaggctccgtggggccagtcctgcgccccttagagcaagtgaagggcatgcttatgaaagaaaaggcatatgttgcaaagagctatcaagaagagtttttaaaaagtgttgctatgtaagtgtaagcgaaaaaattaagtctacttttatggtaaacttaaacataaattttatggtcatttccacccaagttctccagacggcagaggagtcagcaggaattctcctaaggaggtggaggtgggagggaggaggaaatggcctttgcaagcctgacctgttgtttgaaatctcaagttaccttacatgttttatgatattaaccatgtagtccatacaatttttgggattcaatatgaaatattttaaacatatttaccaaggagctcttctccagagatccttgatttaggctgatgtttcaggaagctgagctgtggattagtggccctgtgtgcccttggtctcttgctgtgtgtgtgtactctggcttcagaagcagagacggactgtgttaccttccataatgatgccgggtaaaggaggcattagctgatctggtgaaatgtaaataagatttgaattaagtagttcaaaaaaaatttaaaaagtttgttttagtaattgtttttaaccaataaagattaaaaatacttgttttctgtctgcagtcatcttactgctaggggttcaagagaaggtgcactagtagtttttatctcgagtctcgctgtttattctctgtactttaaaaaagtgactgtgctgttgccttgagctggttgtgggagcatttgtagggtccctgttggaatgaggaccaatctgcttcataactcctctctgtctatgggctagaccaaagtacccttggagaactccatgtcttccaggaagtttccaccctttttctcctccctctttcctgagtgttattgtctgcatgtccagctgtgtccctctaacctgattttcagccatctgccaggtccctcgagttgaggcttcactcctcctgtcctgattcttgaccctggcttctgcacttgctggtggccctgcagagctctggcctgggaagtagaagaatggctgcccacttgtgtttgtgttacctggcttttcatctgcacagtccagagggaagttctcaactgtcttacaccccaggcacgtgaggtagagtgtagccaactctcccagcaggacagacttctgggattcttagtcctctaacttctctctcatatgcagatgagcttttgaacttaaagcaagaggcgagtgattattttattagcacctttagggatgcaaagaagtaggagtgtgtgtttgaggggaggtgctaactagactgattcgttgtgcccttccttcagagtgcacctagacgagtcagagtcagagtttccccagaatcatttggcacgccatcctgcgacaccactggtttctgctcgtaaatgagctttttgaaaaaatcttgattcggttgatagatacatatctaaatgtgcattcctcagtccttcctaagtagctctagattggggctgcttaaaaatgaagaggctgcagtgactgtatagagtatgttgaaaagatcatggaaatgaggtcctgtggaagtgcgtgctcataccttggcagaagttcagtgctgagaccagacacattcagcttgcccaggaacctaacgaaagtcaacagaaaagaaatcgtgggtytgagctgggcagcttcatggcaacgctgccccctcacctttgacagaaaggcagctgggagagaaggagaccaaagacatgcaggtggaggtgcggacaggctgctctgaaattcaagtcttttttttttttttttttttttttgggagacagagtctcgctctgttgcccaggctggagggcaatggcacgatctcggctcactgcaacctctgcctcccagttcaagtaattctcctgcctctgcctctccagtggctgggactacaggtgtgcgccaccacgcctggctaatttttgtatttttagtagagacaaggattcaccattttggccaggctggtctcgaactcctgacctcaactgatctgcccaccttggccttgcaaagtgctgggattataggtgtgagccaccgcacctggtcgaaattcgagtcttatagtcataattccactgaaaggaaaggtcagggtccttcttttgggtctccagtggctcacttctgtagcaggaaagggacatgacttggggtttggtgaactgtttaaaaaggcttttcaggctgggtgtagtggctggcgcctgtaatcccagaacttcgggaggccaaggcaggaggatcacttgaggccaggagttcaagaccagcctggccaatatggtaaaaccgcgtttctgctaaacaaaaatttagccaagtgtggtggtgcctgtagtcacaagtactcgggaggctgaggcaggagaatcacttgaacccaggaggtggagttagcagtgagccgagatcacctcactgcactccagcctgggtgacagagtgagactctgtcaaaaaaaaaaaaaaaaaaaaaaggcttttcagtagtggagcaggtctctgtgaagaaaagtgcttcccttagagtttgaaaaggaacccttggggcaaataaggacgtccctaggccctgaaggtgggtcaggaactctcaaagattgaaacaccacccctcccccaccatattcctgagccctcactctcctgggtcactggggtgggaactgtaaggatggaaattccaatcctttctgtgcttccccaccaccattcggcagcagaagtgtgtaattcatatctagtgtgacccgtgtttctccggaatttgtggtctgcctgtcgaacagccagcccccttcccaccccacctgttaggatccccgcaggctttgctctgctgttctgggatgaaggatgttgctgcttcctccattgtgccaggtggaccagcctctggccctgtccctcaaggtgaagctatgtgagttagagccctccctgtcttgtagctacatggcgggccaggtgctgctcctcctggctttacattctgtcccrggaatagccaagccatactgcttcatgcagaagctcctggttttcgtgttttttgtttgtttgtttttgagacagggtcttgctctgttgcccaggctggagtgcaggggcatgatctctgctcactgcagcctctgtctcctgggctcaggtgatctgcctacttcagcctgccgagtagctggaaccatgggtgtgcaccaccgtgcctggctaatttttgtatttttagtagatacggggtttcgccatgttggccaggctggtctcgagctcctgggctcaagcaatctgctccttagcctcccaaggtgctgagattgcagacgtgacctgccgcgcctggctgctcctgggtttcagttgcgcttctctcccctagtggtgtctctgggcacggtgggccctccgcaccacatctgtcttgctgggccggttttatttctgkttccctggccctggcagcctccccgccctaggcatctcccccactcccagtgggcaggaactccagtgattcaaacttaaatgsctgctacccagtacagtccttgaggagctctgcagtgctctgtgagcttttgaggggccatgtgcatcagaaagcacctgccactaaaaattgttgtagaatcagttatctgaactctgggttcagcgttgttcccaaatgactttgctctgtttccctagctctcctgcctttggccctatctggctctttcccacctactctgggtgttactcttctcacctgcccctgggtagggcccccgcagcactccatggagtaatggggagttgaaccattcagagaagtgtagtttcctgttcttaatgaaagacatcaggtgaacaataaaatcctcctgttcctctaaaacaaatcgcctttcagacgacagraagctgccctttatgcctttgtgctccccmttccctgtgggttatttgtccttgctggagaatgggttttctctcctgctgtacatcattgaggacatcatcctgtcagggttttgctaggctggtgttgtgtggatattgataatgataaaaagcaacaagcatatrggaagatttgctgttctcctcagttatctcttttggatatatgctgtattagcaagaagctatttactctttcagtaagtgtttgttaagggtggtggtatttgaaagccttgagtttataaagtactaatgaaaccttttaaatacgaagacagctttttacttaacaaatgtatagtgagcagttaacaatgggacttaatactatgtgtaagtgaccttttgcatgctgtataaaagcttgtcagagttcaggaggtgttactgctgtggttttgggtttgcttgagaacattagatgttatttttctccaagacacatactagtgaccttaacaacaacaaactcatttttcttggtatgaggactagagttaggagaatttctgaagcscttttggaaagtaggcggacatttgagttcctcatctgccttttcccctggtcatcatacatgggatcattaagcagaacacagagcagacttgactaaagcaatgacattttgtaatgtagcttatggaagtagaataggaaggctcagctaattacctgtaatttcaaaggcagccagtaggtttcctgtgtacagcaccttggaaatcttttgtatggacccaaaaatgagtgactaattacagaatagaaaatgaataagctttgtacgaggttaagcaaatttgcaggaagaatgtatttaatgcatcatcatggaaagcaatttttgactgtcatcaacgatttcaagttaagcaagtatctgtaatgaagcacaaaagattgataaaaacagagaaaatatcagagattggatttgtccaagtaggctaactgaaaatttggtccaacaaacatcagcaagtgctcactttggaagagaatttgagtttttaaaaaattagaccccaaaggtaggtacaaactgatgatttaatatctgttattagtgtttcttagagaaacagaacgaagtgtaacgtctttggagaatacattaagggaggaagctttccaaaacccaacatgaagactcatatacagtggccagcattgacattcctaagaatcaagaaagcatcatatgatctttgtcatcaataccactgttcactgtataaccgattccataggctcagagagatgtggaaatcaggatgttttgagaatcagtgaggtggagggaacagggctgggccctagtgatgaaatttttaacgaagacctttcattttgtgtgtgagaaaccacttttgatttacaatgtatcatcaacctcactctctagacttctagtactgaagtactttagttcacgtcaaaatctgtttctcaattagggagtgaagatttggcaccatagagcatattcaaaaaactgtgttggagggcagtcctaaaagagaaaaagttctgaggatattctgtgttgtcaacagcttctttgaactgagagtttggcctctgacgtcttggcttgaactagctgacatccacttggcagacaggccctctgaatttctagcatttacatggtctcattaccttagtgtgggacgtatataatttaagggccctgtgcgtgtttactgagcaaagaaacatcaaagaaagaaaaaaaaaaagtcccatgccctaccaccctggtctaactactacgaaccacagaagaccattctggacagaagagtrgatgtatacagttaacagttatttcataaacacagaatcgtatgcatggtatttagtagaagataaatataagttaataggaaggaattgtagaattttttttttttttttttgagacggagtcttgctctgttgcccaggctggagtgcagtggcgcgatctcagctcactgcaagctccacctcctgggttcacgccattctcctgcctcagcctcccgagtagctgggactacaggcgcctaccaccacgcccggctaattttttttttttttttgtatttttagtacagacggggtttcaccatgttagccaggatggtctcgatctcctgacctcgtgatccacccgcctcggcctcccaaggtgctgggattacagatgtgagccactgcayctggccaggaattgtagaattttatatgaaaacattttacatcattggatcacttttattttgccttttccttgttgatttgttggagatcttggtatataatagattctaatctttgctactatatacgttggaaatatcttctgatatatggctttgtcctttttaaaatcaataatacatttatgtttcacttgccaaattaaatctgacattttaatgtagtcaaatttttatttaaaaaaaaattttttttttttttttgagacagagtctcactctgttgcccaggctggagtgcagtggcatgatctccgctcacggtaacctccacctccctgttaaagtgattcttctgcctcagcctcctgagtaaagtagctgggactacaggcacacactaccatggccgactaatttttgtatttttagtagagacagggtttcaccatgttggccaggctggtctggaattcctatcctcaagtgatctgcccaccttggcctcccaaagtgctgggattacaggcatgagccaccgcgcctggcttctctcatttcgttttttgtttaagaaatccttcctaccccaagatcattgtctgctgtgttttcatctaaatattttgctttctacagtatgaactttcacttacctatagtttgtttttacagtgtagcctgagcttggggttcaacttatttttaaaatgtggataatccataggcactgtttagtaaatagaccatctctccccattatttgccacctctgtcatagatgtttccatccatgtgtagggcagtttcttctgttcaattggtatttgtctttcctgattcataccatgctggcttgactagcatggctttatgtaagtcttggaaactcgtccttccaggtatcttcattgtgttctttttttctggcaaatttctctcctcatggtggtgtgctcttccatctacaccctggaatcatcatgttgattacgtgagaaaccctgttgaactggggttggtactgcatcgcgttcatggattaatctgtggcactggagatatagcagcgggcatgaccgctcagccactgcccgcccaccttcaaggagcttttattctagtggtggcaacagtctagtgagaatcggagtgctagtggctggtgggggtggtgttatttttaggtgaagcaatcagggagagcttcattgatagggtaacatttgggactggggttggagtgaggccggcaggaggccagtgtctctggaaaccaagggagagaatggcggatgaggttgggggtacttgtaggacttcataaatgtgctaagaagtactttgagttttatttgyagtaagatgggaagccatgaaggaatgatgtaataaaattaaattattttaaagtttatgccagatgctatctgggcaactggagggagacttagaaggaagccgggagaccaactaggaggctggcaggataatccaggcaaaggatgatggtggtttgaaacccaggtggtgacattgggaggtagtaaggagtgattgcatttcggggatattttgaaggtattgctgagcaggatttacccatggatggatatcggatatgagggaatgagaaggaatagaagggacctggagtttttggggttgagtaactagagtggacttgccatttactgagatgggggttcatgtgtagggtgcagctttgactttattgccctggagggctggtgggtatttaggagttggattttagatgtgtcgagtttgagatcccttttagacatctagtgggagcggctgggcagctgtgaactacacaggattatagttcagggcaggagagaattttaggagttatccatgtagtacacttggttcttagagccatgagtgcatttaatcatccaggaggtaagcataagtagagaagagatgtgaagactgaatcctgggggcactgtagccgtcatcacatagagcttgcggggagataagagacacagtaaagaagactgagaagagacgtggccagaggaggaggagaaccgagagatagtggtgcactggaagaaaacctcaaggagggaacgagccccactgtgtttggtgctgctgaggactgagaattgactgttagatttggcagcgcggaggccacttggcagcagctctttcagtggagtatggagactggagtctggcatgggctcatgagagaatgggaagagaggatttagaggtggtgattatgggcgactcctcggaagggtttcatggaaagagaactgggagtgccgggcaggctccggggtttgtttgcttaaagacagaggaatgatggtagttgtgtgatgatgggaaagagctcgggaaggggagggccaggagagagagagtgcagggacagtggctggaatgatttcctgagatggccagaagggattgcatcgaagagcatggggtgcatgtcccttactcgtatctcgtctctctcagtaatgttttgttatgaaccttttgaaagttttgcataacctttcttgattgattcctagaaactagagtttttgttgttgttgttgttggtctcgttgatggaaaagcagttggttaatgccagtacatagaaaggctgtttatgtatatctgatcttatatctagcagacttgttaaactgtctttgtatttgaaaaactgtaatttcttttagatttatatgtagacaattatatcttgtgcaaatagggatagttttttttttcttttcgaactcctgcagtacctgttatttcttgtactgaattggctaggaccgtcaagtacaacgttgaatgtaagttgtaacaacaagcatttttgttttatttctaattccaaaagagtggatctgtaaaattttactattaaataaaagctgtgaatatttgttagatgctcttttttaaaaaaaaaaatctggttaaagttttattactagcttgtgaagagttttaaatcttggttattgaatatgtttctgcatttattgcagattgttgttttacccttatttttattttctgatgttgagccatccttacatttctgggataaatgtgactctgcttagtcacatgtattattttgtgtatattgctacagtttttttcctaatcattgttataattagtcacatgaaagagaaagacacaactgaatatttttttctcttctcagtttttagaatttttggaaattctgtttttttctggttttggctttacttgcctaaaaaatcatctgagcctctctgctgccttttaggatggaaggtgaactatttattttccatcgagaatttgatcttattgatttatgagtactatttcttgaatcaattatggtttaatgtcttttatattagaagattcttaggatacttaaacatctatactggctctgtgattcagcatgcctcattctttttgtaccttttctcttagaggtatttcttttctctttttttttttaaagaatcagtttttgtctcggttctttctgttgcatccttgtctttcattatttctggttctttatttccttctgcctttaggttatttggttctttttatagctcattgagttgaacattgagctcgtattgttctttcatgaacattatcctctaaatgcagcttttgctgcatcctgtaagtttaatttcatttttttcactttcagattttttttctgtttatttaaaatacattcactttttttcctgagacagagtcttgctctgttgcccaggttagagtgcggtgcagtggygtgatctaggctcactgcaacctctgcctcccaggttcaagtgattctcctgcctcagccttctgtgtagctgggactacaggcacgcaccaccatgtaacagggtttcaccatgttggccaggctggtctcgaactcgtgacctcatgtgatccgcctgcctcggcctcacaaagtgctggcattacaggtgtgagccactgcgcctggcccacttattttttgagtaggatatttattcataggtctaaaaggccaaaaagtataaaaaatgaaaaccaaaaaatgattttagtttgatgtgagaacatttacatttctaaggtgaaaagtttttttcttgtgattttataaaatattttatattgggattagatttaaatatttgttcagggttcatatatgtacatatatgtcaaatgtattttctttatgaagtatttactatacccttcattgttttctggcccgatcttttaattaactggcacaaatgagttggtttcctaagattataggtttgccaataaatattttgtatattttgagcctaggctttagatgtatacaaattcatgatcgtttattgtattaaggtgtagtgcccatcacttaatgaatttttcccttaaaatgtgtttatgttgctgtaataactagttttggatagtatttactagttgaatctttttccttccctttttatttaaaaaagtttggttttgtttggaactctgtcttgaragcaccatataactagattttaacacttcagtagtatcttttatcagtttaatgtgtttaattttgttattactataatgtttggaattcttagtgtttgctgtttatcattcttcttggcttacttttagtgttagcaccttgttggtatgagagatttttctacatggatttgctattactttgctgtgttgaactatacagattctgtgtctgaccttgtggttgccattagtttctttgaattctgcttatctgttattttgattaaattattcaataatttctcctggaatgtgacaaggatattggcattcttcaccttttgaatgtattctctctcctatttgacatgtatctagaatttttaattcttttcagtgtaccaaaaatgaaatatgtatattactttaatttatatccatctttcttgaagacacaataaggaaattcactgattaactcttcattctaatctgtaatcttaccctccactagattaattttaactttagaaaacacatcaataatacttctaaaaatcacaggttacttaaatttcccgacatttcatttgagaacttactgttttctttattccttctcttctacgtgggctgttttttcttcctgaattacatctttttcttttcttttcatttcttttttttttttkgagatatagttcacataccgtagaatttctccttttaaagtatgtagttcactggtttttagtgtattcacaaagttgtacagccgccgccaccactatctaataccagaacatttttatccttttggaaagaaactccatgcccattagctgtcaattcccatcttactctagacccctggcaaccatgaatccactttttgtgtctgtgagtttgtttatcctgtacatgtcatataaatggaaacatacattttgtgtctgacttctttcacttagcagaatgtttccaaggtttgtgttgcagaatgtatcggtgactcattcctttttgtagctgattaataccccattttgtggatacactgtgacttgtttatccattcgtcacttggtgggacatttgagttgtttctactttttgtctattatgaatatgagcattcatgtagaagttttagtatgaacatgtattttctgtgttgttgttgttgtttgagtatgatacccaggagtgaacatctttttttttcttttcttcctttttttggagacaggattttattctgttgcccaggctggaatgcagtggcgcagtcacagctcactgcagccttgatttcctggactcagatgatcctctcacctcagcctcctaggtagctaggactgtaagtgtgtgccactacacctggctaatttttgtaatttttgtagagatggagtttcaccgtgtttccctggctggtcttgaactcctgggctccagcaatctgcccaccttgacctcccaaagtgctaggattacatgcatgagccaccatgccttgccagacatcttttaataattattttagtgaggatttggggataagttcttggtattcatttgtctaaagataattgcactattgtcactagtaatgacattttagctggagataagtttattggtttaccgtttttatcagtcttagagctgatgaaaagtctcctgtcctccttttctaagttatctgagtttctgatagtttaagatttcttacctttgatagttctgtagttttattacagtgggtctaagagtagatatggtatacttttggtctcagtatgaattgatctgaagatgttaacatatcttttaataaatgtcagtgccttgaggaattgtgtctatcttcataaggtatgtcagtctataattttcttatttcacatcacagttaatgctggcctcataagaggagttaggaagcactttctctgtttctcaaattgaatgtattgtactggtttggattctttcatgaatatgtactaaaatttatcagtgaagctattggggactaagattttctttgtgataagtttttagattatgaattcacagcctttaattaaacataagctagacttaacatttctccttgggtcagtttttgtgaaagttgtatctttaaaggaatttacctcatctaaaatgttgcgttcattagcagatacttgcttctgctctttattattattacctttactttcagtttaatttgctttttctgttttggtttcttaaggtggaagtttaggccattgctgtattgtcttacatgagcatatagtgctgtacatttacttgcagctctgcttcagtctatcaaartttgatatgctttcattagaatccagttcaaaatattttctgggttgmtttgtgatttcttctttgacccctgggtttagaattaggttaaattktggatatttgaggtttttctaaatgttttattgttgattttgaattccattgtagtcaaagcacatttcctataagatttcagttttttggaatctattcagaattgttttatggcccagtatatggtctgtcttggtgaatgttctgtgtgtatttgaaaagattatataattctctggttgttgatggagcttttcataaataccagctaaaytacagttggtatggtcacataggtctcccattttttttttatttttttattttttaggcaaggtctcactcacccaggttggagtgcagtggcgtgatcatggctcagcatagcttccacttctcaggctcagatgatcctctcacctcagcctcccaagtagctgggactataggtgtgtgccaccacacccagctagtttttgtagagatggggtttcatgatatgcccaggctgatcttgaactcctgagctaggcgatctgcctgccttgctcggctcccaaagtgctgagattacagagcatgagccattgcgcccagccaagatctctcatctctttgttttattgttttttggtccaattttatcaattactgagaaatatgttagaatttccaaataygattgtgcattggttgtttctgtttctgtttcacgtattttgaagctgtcattagatggatgtatatttataatattgttatattttccttttaaaatcactatgaaacgtcttttttgtttctagtaatacttttcgaagtctactttgttttacattaatgtatccattctagctttggtatatctttttccagtctgttacttttagtttgtttctgtctttatatttaaaattgttctttagaaaccagaatatagtcagttcttgcctttttaaaataatcggatagtccatgctttttaattgaaattaatccatttacatttaaagtaattattaatatggttatattaggtctatcattttttgcttttcttagggaagggattttatttgcttttgttcctcctcttttgctgattttgtgttaaccaaaatttcttattaattttaattcttctgttggttttctagctatatgcatcttagctttttctttaatattgaatcactttggataagacatataattttttcaatgatgtgtttccagttccactacttatccttagtattattgtcacagttgttgcatttatatactttgtaaacccatcagtagtgttgtattttttgctttatgctgtcatcttttatagaaaactaagatattacatatatccacataattaccatttctggctgtcttcatttcttcctgtagctctaagttgccatctagtgtagtttccatttggactagagatctttctttagcatttcttgttatagatctaccaatgacaaatagtttatttgaaartgcccttattttaccttcatttttaaaggaaacttcttctgaatactagaattcttggttgactggttttcttccttttccttcttcagtaatttgaatatgtggtcccagtgtcttcagacttaaaagtttctaaggagaagtctttgttcttatcgttattgttgccgttgttttcctgtttatgacgtcattttctctggctgctttcaagattttgtttatccttggctttctaccatttgactaaggtgtgtctagaagaagttttgtttgtgttattctgtttgaggtttattgagcttttgggagatatttcagttgttgtgtcttcagatgtcttttcctcctttcctctctctagagtccaattaaggtactgcttcctgttgtcacatttttgggaattctacttatttttcattcatctctttctctttatgttcttcagattattctgtattcaggttcattgcagatggcagaaccaagcatcaatccgttgcttagccagtctaatgcatttattttagtaaatgttttgttcagatctaggcttttagtttttctggtttcatttttctcccttgagattgccrtatctgttcacttattgataccatattttccttcaattctttgggcatgtttttcagacgtttttgaaatatttatgataaatgtttgaagtctgttaaatccaacatttcggctcacttggaatcagtttctgttgactatcattttacctgcagagggtcaagatttcctatttttttcttgtctagtggaaagttggacatatgctgtagtgagtctgaactcttgtgttcttctgaggattattgtgtttttattgtagcagactgttaataaactgcttggtcaaactacacactttgtttttcctgtgatatgcagccgcttgtagctctcctctgctcttasgtctttgcactggtggtggttttagtgtggcaccctgtgagtctcccctgtgtctgcaaaatttgaaagttggctaaggatctgagtagagatggacttttctctgtggttgtctttattctggggattcccctagtttctagcactccaccagctttgagctctgtactctgacatttcaagctttatgccgccctagcttgagcatagttgggaaagagcatcatattcacagatttggctccatgttactcttttttaaaaatattgctttctggtttctgactgctttttcaccgtgctgcttgtggtttcctcagcacatatgtagtatgtagttcagctgtcagctagggatttcagcatcttatgctctgaatttgagtgtcacctctatattctagtgctgtcagagtgctttaaatttctagctgcttccccaattccagattttgatatctggcacctttagttggtgaggaactggcttttgtttgcccccatgttttgcagcaatagctgtgggagttgagcagtgccttgagccaagatgccacaaactcacaattcttaacccttctagttacagtttttgagatttaactctcttcctggcttttgcaaatactacctttagatcattgaaaaaaaaatcactaattagcttggcatggtggtacacacctgtaattccagcactttgagaggatgaggcatgagtctcacctgaggccaggagtttgagacaagcctgggcaacatagtgagaccccgtctttactaaaaataaaaaaaacttagctgagtgtgatggcagtgtgtgtagtcccagctacttgggaggttgaggtggaaggatcacctgatcccaggaggttgaggctgcaatgagctatgattgcaccactgtattccagcctgggtgacagagtgagaccctacctcaaaaaaacaaaaaacagttattataaatgttatctgtgagtgtttgtgtgacctcttcacccttcctgccattacagaaagttgatatttttagttttgaaatactagggtgagtatagcttgtctgtttcatgagcgtgtctttctgttgtgctttcattgcttttagggtcattattcagtttattttgttctttttttttcccttgagataagtttgtatgagagtcagccaccatcctttttctgttcttctttttatttgaaattaggttgtgtgcacttgtgcagggagggtgggcgggagaggttttcagaggccacaggattctcttttccggcatctcactaagtacttgacagtgtggcctggtaccttttgagctcaagggctgtcctcccattcctctccttccccatccatctgggctagaccttctctttccattgcgtcccccaccccacactatccctttcctgctccattgctgttctgttcccagcagtttttcttagtagaaggaggctttggctggctagtttcaagagcccttcagccttagactgctgcagtcccttcggacctggctgtgatcacttgcatccacctatagatggaagtgtgcaaagacccttctagttttggctgctattctcagctggctccctgagttttcctgtgaggtgcctgttgacagtgtcagggttcttctgctcccatccatcagacaccctgttgctatcctctgcttcctctgcacagatcctcayccacctggtcctgcagcttttgcccatttatcatccctttccagtcacttagttttctcttggctattatctcaagatttgagggattgggcaatttytgcacctcctctgctgtccccattctcctccatctgccttgaagtgaagcagattttatcctgctctgaagcctggggcatggatgagaattctttcaggattctctcaccaactttctccagtaacaggattgacagacgatagacaggtgtgggctctgttccctggttgccctttcacttgagagtgtagcccctgaccttgcctgtctgcgtgggctctaatctgaccttacagccccgtcactgtggctctgtgtccctgtccagcatcagcacgtggcctcgggatatctcctggcttcagacttggctcactttcctgattttttttttttttttttttagttttcatctttattttcctgatgacttctcttcattctagcttgtaaatgatgtatttttaaaagtagttaaaagatattttatccaactctatgtgtgtatgtgtgttttttgtactaggaggaattttgggggtacctttgtccttatattggtggtgtaaattatattttttaaaacttttctttttaaaaatagcttatgtgtctcatggcgtagcgtgcttttttttttttttgctctcctaagtctttttgatttttaaaatactttgtttgccgtgcatgttttaagagtttgctctctttaggaaaccagtcaaggtccataattttatgaaacttgggctgtcagttatttacagactaaccagtgtggacagaagtaagaggaaaagtgtaacacttgtgttatgaggtctgggagagctgaggccactccccctgttttacaggaggaaggtcctaagcagtggcctcgcccagtcagccaacctccagtttcacccacgagaatggtgggcctgagaccaagagaaggccattattcagtcatgttgaagtgcggggcgctgcctaagaacctagctcctaggctccccacatcactgcagggcaggcattagtcaccacttttagagctgaagagaatgagtctttggttaagtgttgaaatagaagtacagttcagatctcaaaataaagacctttgtcttacgaccgcatctccaggccagtggcctgggagccagagagagcttgttctctgatgcccagggccctgctcttcctccccatcagtaggaaacgatggccttggaggcttattttgctcatcactctcgccccactgctgtaaataacagaatggccctcgctctgcggtttctagaccctggcactgtttttcaaacttgactgtcatagagaccgctgctaaaaggaactgtctgcacgtccgtctgggtccattctcctactcatgaccagtggtggaaattttaggttgtttgaaaaaatgtcttttaatggcaaattaacattcaagaagagtaattagacttaataactggaaggcttttttagtccatcacttaaaacacaaacgtggaaaatgtcacagaactcttggcccatgtagcgcatgcatctgtcccatttctatacttttatctgagtgttccaggttacacttgttttaaataagagaagaaagagggagaaattgttcatagtagctgcatggttaacggtgttagctagtttgaatcrgatttctaaatcagaccaaaaaaaccccaaaaaacaaaaacccagaaaacagactagatggtgcttttgaataggaataatatataaaccattgatctcaaaacactaaaaactagtatatgctcatcagtcagtgaattagctttttactctaaacttaagagtaagttttgctttacttttagaaacttttagaaccaaacatgggaactcatgtaatctaagtaacttagtagtgaaactctattctgctccccattgggggaaaaaaaagcatatgcttggtagaaagaatgttagaacttgaaagtagaaagaaatgttagaactcraatcaggcaaggtaccatcagggctcagagccacactggtaattcgaatggcggaaatttcatagaattgttggagaggtgtttaggatcctccagagaaacgaacccataggttagagagagatatatagaaccagatttattatagggatttgtttatgcaatgatggaggcctagaagtcccatgatctgctttctgcaagctggaggccccggaaagtggtggtggagttccagcccaaacccgaagtcctgagagccaggggagccagtggcgtaaagtcccagtgggagactgaaggcccgggaaccaggggcagtgacgtgtgagggcaagagaaatggatcctggctcatgaagagggaaaggggatttgcccttcctctgtctacctctttgttctctccaggctctaagtggattggatgatgcctaagaggcttaagagggcggctcttctttccttagttcactgattcaaatgccagtgtcttccagaaacacccccacagacaaacccagaaataatgttttactagctacccatctgggcatcccttcagcagtcaagtggacatgtaaaactcaccagaggggctgaaaggagatgtgtacagaggggcagctgcagcaagccgctggcgcaggagcatgaggaaggagctgagagcagcgcagcctgcctgctgctgagattcgaccgcagggagcgggtgtacatgycgcagggacgcaagacctgccagtgctggacagagtggccatccacaaagtcctctgaggtcagcaggaggggccctgcatgccgacccaccggctgtgccacctggaaaaccacatgctggagaagaaaaggaatgcttgcagtccctccagcaccctctgttggcaaagcctggcatcaagcgtcacccaggatttcagagcagggcagggcgaggtctgcatctgagaagcagcaccttcacacctcctccacgctgctcccagagccatctttccaaaatgtgaaattcattctggcatccccctaccagaggatcttcatggctgtcaaacagaaagtgtttcaactttttattttgcagtagttttagagtttcgcagcaaagttgtaaaaatgatacagcattctcaaataccactcctccaacttcctgagtgttaacatcttctgtaacattgtagcacagttaccaaaaccgggaaagtctttgggaggagctatgcaggctgtattcacactgcacgttttcccatgaatgcctttcttctgttccaggacccagcattgcattcagatcctgtctctttaggctccttccttctgcgacggttcctcagtctttccttcgatgatctggacactttcaaagagtgcctttaagttcttttgtaaaatgttcctaaattctggttttctgtcaggttagtacatttttggccagaattccatagacacaacactgtgtccttctgtgttagtctccttgggcagccgtaataaaatacacaaaccaagtggctcaggcaacagacatttgtttcctcactgtttctgagggtgcattccaaggtcaaggtgcgggcaggatgggattctcccgagggcttccttccctcagaggcttgtggatgacatctctctgccgtgtcctcacacgctctttcctctgtgcgtgcgtgcaccggtgtctgtgtgtgtccaaatttcttcgtatgaggacaccagtcatgttagattagggctcaccctctagatctcatgttaactcagtcaccccactaaaggctcttgtcttcaaatgtggtcacattctgaggttataatggttagggcttcaatataggagttttaggggactgcagctcagcccatacatttcagtgggtcgcttatagatggggtatatgatgttgtctaattactggtgatattaactgtaatcacttggttacggggatgtctgccaagtttttccaccataaagtaactacttttcactttgtaattaatacatatcttggggacgataactttgagactgtgaaaatagggcatttctccttgaacttttacccatctttagcattcattccattggcctgcagcagttctgtggtgcttacctaatggtgattgtctgttcctttgtttcttccacatttgctaattggagttgttttgcaaggagaagctattccttctctgtatatcattcattcatgtctttttttttttttttttttttttttttggagataggctcttgcactgtcatccaggctggagtgcagtggtgtgaatgtggctcactgcagcctctacctcctgggctcaggcaatcctcctgcctcagcctcctgagtagctgggactacaggcatgtgccaccacacctgactaatttttaatttttttctgtagagatagggtcttgctatgttgcccgtgctggtcttgaactccttggggtcaagcgatccacttgcctccacctcctaaaatgctgggattacaggcatgagccaccgcgccgggctcatttatgtctttatgcacttagatttttttttaactctatgtattataatccagtattcttattctgttactcagattgtcgtagctttggtcattggaagctcctgcagtttgggtcctatgtcctttcatcatgttttcccaatttcttattttcagctaccacaggacactcagggtgcatcttgaattttctttgctccagctctggagtcaggcacttgagggagcactgtttcattttattggcaaacggcatttagaaatgcacatgcggggcaacacgtgcttgttgccgttgcctctcgaacctctaggaggacaaagcttggaagtgcatgcctgtatcttagcccacacaaacctgcacatctatatatggatctctctgcatatgcagttaaaaatgagttcctattgatgaattccatttccagtttaacaccatagcattcattctaaccttcttcttttccttaattgttaactcctttctccagcagtgagaaatccatactccgctgtctgtaatacatttactcatttgctcaactctagtataacatcaaagtagtttcaaatttgctaacccaaatccctctgagaagcagctttattaactagaacacatgccagtgaactgtagcccatgggttcaatctggcccgcttgatgtttttgtaaataaagttttattggaacacagccccgcctatttgtttatatatcacgcatggttgcgagagagaccatatggcctccaaagctgaaaagctttactgtctgaccctttatggacatggtttgctgactcttaaagtccaagaatatagattttgtgtacggctctttttgtctttagctttatggtgtcccagtcaaaatactgttttccaagattgctttttcttttcacctccttcaatgtggttattttattcatttgtaattgagttagattaatttgttactgcttggattccatttttttgttccccatacacacatcctggttgattgtcattgtgtgttttggatgtgtgaaatattgatgtggcttccaagcgtgagagctgtgcaccagggtatacactcagaaaagcctcctcgttccagctttcccattcccattctgtacgccctccactccttttctacccaccctctgtgggtgaccagtctctttagtttctagtttgtctttcatgtatgttttgtgcaaatcaacagatacatatgtattttattgcattatctttcttaaaaaaaagagcaggtagtatggtataagatactcttctgcacttgacttttttcacttatcaatatgtcttggaaatcactcacatcagctcttaaagatcatcttcattttaaaaaatagccactccttcgtgtggatgtaccatagtttattcaaccactctcctatgtatggcatttagaatgtttctggtgtttgtaattataaacggtgttgcaatgaataaacttgtggatgtgtagttttatactgttggaggcctgccttcaggatagtttcttagatgtgggattgccagtttttaagagtactttgtatgatagggatattatattagtccttggtgatcctttgtatggtaggggtattatattagtccttggtgatattttgtatagtaggggtattatattagtccttggtgatcctttgtatggtaggggtattatattagtccttggtgatattttgtatggtaggggtattatattagtccttggcgatattttgtatggtaggggtattatattagtccttggcgataytttgtatggtaggggtattatattagtccttggcgatactttgtatggtaggggtattatattagtccttggcgatactttgtatggtaggggtattatattagtccttggcgatactttgtatggtaggggtattatattagtccttggcgatactttgtatggtaggggtattatattagtccttggcgatactttgtatggtaggggtattatattagtccttggcgatattttgtatggtaggggtattatrttagtccttggtgatattttgtatagtaggggtattatattagtccttggtgatattttgtatggtaggggtattatattagtccttggtgatgtttcttggacatactttctccccgttggcttttgactttgatcttggtgtatgtgtgtgtgtttatttttgcctttatgactcgcccttgcctacgggataatgacataatgcatagttgtctaagtgtgtgatgggttaccctttgccttttgttgtttgcattgtacttcctaactcctacttcacaagatttcagttcaggcatcagttccgaaatgatttctcaactagcatgagttaaagaaagagattatgttctgccttctcagagggtgctacttttaaaagttgtttgatcctcatggtaccctttaatgactccctgtgattatatgtctagtaccagttaactatgtcagagttactttcagattttatcagttgttgtgactgtatgggatgactcagtgttggacctgagactttgcctccaattttaatatatttcatgaatccatttccactaaaatcttttttgttttagtatataataaaatctacacatctcagttttgacttgcctggtgtcatagtccatttggagagctgtaacaaaatactataaactgggaggcttagaaataacataaatgtatgctcatagtcctgggggcccagaagtccaaggtcaaggcacccagcagattggtgcctggcgagggctgctctctgcccttctcacagtgtcctcacatggtggaagggactagccaggtctcttatcagggcaccaatcccattcatgagggcagagccttgtgccactctcctatgtatgagacctagttrtttctcaaaagtctaaccttttagtaccatcatactagggattgggtttcaacataggaaattttgggggacacaaatattcagaccatagcaagtggtcatttgtgtctattcagttattgcaggcaattccttcagtaaatagagaaagagcttgtcaatgcatatcatcttgtgtcagatcagccgtacagaggtccatttactgggagctaatgaagcttcagtttcaggtctgacagaagtttttgatagttggcgttatagaggggacatttttgcatgctcattaattctttagtagttaagaaggatttcctctggaagcattaattagcaagaatatgaagtaaaagtaaaacatagtagaccatgtaaaaacttcctgaactatgttgcatagataatactaaagatagaactagcagttgtttatttttaataagctctctagacttaaactattttaaataaaaacagagcacctgacttaaaatagcattttwaaaagtacctcttcagtagtaataggctgtcactgctagcttattggttattttccctcagctcttgctctcttctggtcagttatggattcttgtttgaggagaggagctggcaacactagttggccctctctgtacttaacatcatgaggctcctagaatttagtaaggagatactcaaaagtagtctatatgggtttttaaaaactagcttttaattacacaagtactcaatgacattattctttttttttttttttttttgagacagggtctctgtcatccaggccataatgcagtggtgccattatagctcactgcagcctcaaactcttggcctcgagtgatcttcctgccctgcctttccaaagctctgggattacaggcatgagccaccacccctggcctctctcttctttaacaaatactaaattaatttatttagtttagagatgggtctcactgttacccgggctggtctggaacattataaagactcctgttggccatctcacttgactgttgtcttccaccctcttccccattcatcagctcttagtgttggtctcccctggaaccttccacatcatctcctgtgcctttgctgtctgcagggtggtccatggactggcagcagcatcaagcttgctggagttggttagaaatgcagactctgaggcaccgccccaatccagttgaattggaatctgcatcttaacaagatctttggtgatttgtagggacatggttttgtatacatgttttctatagtgaacatagaaagtactgccaatgtgtgtttagaatgtacacaaacgatatgatgtaactttttccatcaacaagatgccctagatacctctaaagatcactctgtgtggtgtgtgtagacctgtctcattctttcttagttgcttcctaactttacttctgcagtgttaaatgattagtcacttccccattgaaggacattaaggttgtctgcagcttttgtttttttgggatgtccggtgtagcggtgaactcactctagggcacgtcttgtgtacatgtgcccagaaagtagctggatagaagagtgtgaacatttttaacttaaacatcctgctaaattgccctccaaactggttgtatcaatctgactcttactttgtttcagtgatcaatttacatagtctttattctttataacattgttttaatggccatagcattataatgttttcatatcaagttgcctatccctcccctttgctgtaattcttcaaaattatattggcttttaaagaaattccacagtcttctataggaaatttaaaatcagcctgtcaagttctgtgaaaaattctagtagggatttttttttttcatggctgaagattgtattgaatttctagattaatttgggttggagactaggtatgtgaagtgttgagccttctgatactcatctctgaacatggtatttctcccaatttacttgtcttcttctgtccttgagtaaagttttatagctgaatgtataggtatatgtgcatttgtatgtgtgtgttgtgtattgtagttttgtctgttttcttttagatttattcttaggttgtttttctagctattacgaataggattttcaaaaagactgatttctaattgattgccgttgtataggaaaatcactaagttttcatatgtttaccttgttcctttgctggacactgttttaatggtcagttagagctctaggattttggagtcggcagtcttctaccttcgaattaattatagttcgtacttgcttttccttgtgtttatgcatccatttcattttctcatctggtgtaggctgggaacttccaggaccattttgagtagtaacatggtagagaacactgccgtcgtcatcttcgcctactggagtgcttctagtgtttcaccattgaagtatgagcattcccaaaaatgtctagttgtagatattctatccagatttgctggcgaagaggtctttgttactttttaaaatcatgagtgggttttaatttgatggtgtgcttttgcagcatccgctgatattcttaggttttctcctgtatctaatgatggtagtgacagattttctaggactgaattaccctgttatttcagggacttactctactgggttatcatttattcttctgccactgatggattcattttgctaaattatgtgtttaggatgtgtaaatatctgctgtgagattgacggatccatttgtgcatgtgtgtgtatatgtgcacatgctgttctggttttattttatccgattgttattagaatctaattagttgtttcttgatgttttggtggaatttgcctcaagtttctatctcagacttgtaaacagaattgttggtgcaatttgttttttcgtttttctgttttttttcaagacaggatcttgctctgtagcccaggctggaagtgctgtggtgcgattatggctcactgcagccacagcctcccaggctccaacgatccttccacctcagcctcccggctggaactacagaagtgtgccactatgcctggctaatttttttttttttttttttgtagaaacaggattttaccacattgcctaggttggtcttgaactccagcttgaactcaagtgatccacccaccttggcctctcaaagcattgggattacaggataagccactgcacctggccaagtattttttatttctaataacaatgaacttttggtgcatctggataggtagcattcccattattttcatttccacattgagttaaaattatttttggcaaacttttgggaacaaaacattttcttaaaatgttgaagtaagttttcttaaactttcttaaaatgttgaagtaagttttcttaaactttgtgtaagcagctatttttatgttagttaattattttagagttgaaatcatgagaggggaaaaacaacctttaagtaattgacttgaacctattagaaagtgaaactgaacaggtattttactgttcatggagcatatgcagagtcaacctaagaggtcaaaggaatttaacttataacaagaggaagttctgcttcagttcactgtgaggacttaatattagaaaagtagagtttacagacaaatttagtattttgttattgttgttgttttggagacagggtcttgttctgttgcccaggctggagtccagtggtgcagtcctggctcatactgcagcctccacctccaaggttcaagcaattctcgtgccccagcctccctggtagctaggattacagccggctaccatgcctggctaatttttgtatttttagtagagatggggttttaccatgttggccaggctgctctcgaactccttgcctcaaatgatctgcccgcctcagcctcccaaagtgctggaattacaggtgggagccaccccacccagcccaaatttaggattgagaatagatcctacagatgtgccatgtgggattcatgtcagcttgttgtagggttttgatggaatccattcaaagaagagggagaggatgaagagagccagccagattaaggggcagtgttgtagggtctgccagtcccttggtaacagatctcttattcagaaatattctcatttttcctggtttgtgacccttagtttgccttctcttcaatcccaaagtccgatttttaaagctgccagtaggaacttgagctttaatagtacatgcttatgcttttatactagtaataacaaatacttacagatggaaataggatatgtctgtgttctcaccctccctcaaccctaaccttccagaatatgcctgaatatgtatgtatgtgtatatatgcatatgtttatgtatatatcgtgtatcacataaatagatttttaaacatgcaccagaggtttatataaatatagctataagccttttaattttggaacttaagaatattttgtatgtcactatgtagtcagttaccacatatcaaccttctctacttaagagcctcatagttttattccttagtgtagaatactgtcatttagccatttctctgttgatttttaggttgtttacagttttttccaatagacttactatgtcagaaggaacacacatttaaaaaatctgtataaccagattgccttccagtgtatttgttcatactcacagattgagtgcctgccttcctgcatgtgtatcaatactggttattatcagtctttaatttttgctaatctaatggacagaaattggcatgtgattgttgtaatagtgagatttcacttttttttttttttttttttaccttttttttttcccttgtccaaggtgtgcctatttaatgttcttcgatcaggcagttggcactttccatattatattcagtggtcccgtgtcagcattttctcctaatttactgcctgttttggcttttaaaaatatatgtattttttgctctacagaatgtgtttatcatcaactctttctttatgacagctggcttgtgtgtcttggttaaaaagtccttttctttatcaacattataaacaccctcctatattttctttgagtatttttataggtttttttttttttttgacgttatcctattggaggatattattgtttatgtttgggaacatagagattgagctttaaaatttttccacgtgaaataaccagttgccccaatagtttattgaatttcatgttttaaaaatgctacccgttggcatacactaaatttctgtatatttctgaagtttctgttcagcttcatattcagtagcagtggcagagctgtcgttaccccagctgtagaggacgcactgagcatcaagcacgcaaatctctcgcgtccctgttttttttttttgtcaaaattctcttgattatttttgtgtatgtaggttgactttaagagttttattttggattttgtaagtagtaaaggggttgcattttacaaagccaaaaatacaaatagccccaagaaactactactacgaagatttatttttatttcccatctgctgggtattgttttaagtactttgcagatattgttacagaagaagcagttatactttgatttatttttctttctttcttttttttttttttttttaatggagtctcactctgtcaccaaggctagagtgcacagtagcacagtcttggctcactgcaacctccacctcccaggctcaggcagtccttccacctcagcctcctgaattgctgggactaccaccatgcctggctaatttttgtatttttagtagagacggggttttgcgatgttgcccaggcttgtcttgaactcctgagctcaagtgatctgtccatctcagcctcccaaagtgctgggattacaggcatgagccactgtgcccagcctatattttgatttcatagtgagcaaaaaattggtctgattgcatgactgtagtggggaaatgataataagctgacacctatgtgttttagctgagacagtataaaattgtgtctagtatagatttgaggtgtactgaggttccacttgcccctcaagggacacccccaattctcatatacccaccttgaacacagttaacagtgtttgtgtcctgctttttataagtcatgagcatttcctgatatcatcaaaatgcttttagaaatacaactaataaatatattgtgtcttgcctgttgtattgttgcgaaatctagttattcctacaggcattgtatttttttggtggtatctttcttttgcagttgtgttgtatgtgaaagagtatgtcacctgtgaggtatggagcctcctaaagagacctgggagccagctaacttcagccggagcctaatactcatgcattgaactgtgtgctctttccctcaggcctttaattacaggtacacagttacaagtaatactgtgacctactcttcaatcaccctttcctttttaagagaattaaaaaaaaaaaaaactgtgaaattcctggatcagaagccatggcttttgtcagagccagctactcactcccaccggcagtacctgagtgaccatctgaacattcccttacgagccaccactagacagtacattcaaaacttagctcatttgatagaaaagtgttatcttttaatttgcatttcttagctcactagaaggtaagtgatgtgggaatttttgttaaagttagtatttttatcattttaaacttttaagtctgtaatttacatatctggactttattctgcccagtgttgtgtcttgagggcctaaatctcataatcaattagccaccgtttttgtattattcatgactcatcgtgacttccaaagtttaaacttctgtgtgtactagggtttgttttgggctggttgctgcrtcagaattagatgaatttgtctgtagtctcattgcttgagacaaaatatcttctaaagaaactgaaataacatctttttcatattaaaaacgtttaggcattggcacttcttgttttgtggctacaactaaagttgtattttgtcagcctttaaatgcttaagtaagatagtagctatttacatttaatatggaaaagaggccaggtacagtggctcacgcctgtaatcccagaactttgggaggctgaggcgggcagattgcttgagcccagggttcaagaccagccttggcaacatggcaaaaccacttctctacaaaaaatacaaaaatcagctgggtatggtggcacayacaggtagtcctagctacttgggaggctgagatgggaggatcacttgagcctggaggtcgaggctgcagtgagtggagattgtgccactgcattctagcctgggtgataaagtgagcccctgtctcaaaaaataaaataaaatataaaataaaataaaatggaaaacaccaagaaaaggagtgtgggcaatataaatggtattgatattgttaaacctttctaagaaagattgtttctatgaaagggagattttctaagccytttgaaggtgtttgatacctccctgtgttaatgcggtgtgaggtatgtacagtgaacagctgaattagtcagcagtctttgcccttagttgattgtgcggaccttgggggtgttagaattttcttcagtgtgagtctgagattggagatgtattcattagatgcatagagtttattgacttttgggccacaatttgattgtcttccatgagcaaatggacatttctcttgtgggtgccttgttttcctactcatattatgcttatcctgctttgtctgggcatttttatcaccagattaattttccttcttcaggagggaggcacagttgtattccgtagtagagatgctaaatgggtaaggtgtgaaagctgactctgaccacaattgcttagcatgaaaactgtggatgtaaaaatcatgttaacttgagtgtaactgtatcaccaggtgactgaggagagaggcacgagggcttatttattcagttactttttctttttccagggattgatcccttcctgcctttaagaccacaggtctgttgtaaaagttaatgcaggtgcggtgtcactgctatcctctctgtaggtccctgtgaattgggagtgcttcctgataccccacagaggtgagcactgggagtctgagtattgtccataaatccaactgtttttataccttgataatggaaatgctacctggctctttttctttttaggttcgttctctctctctctctctctctctctctctctctctctctctctctctgtgtgtgtgtgtgtgtgtgtagctcttcaccagtttttcatttttcgtgaatagggatgttatttatgtgcattggatttaatgcttttattataaatcattaaagtcttacttgtatgttgaaatttggggatactttattcatactcaactcatagaagtaaagaattacgtgtgtcaatcattggttctcaagcttcctttgttaagatgttcccactccctcattggacaggtggctgaggggtttgcccagacttaaaaatttgtcatgtctaccagatagtggtggcttctgccctttttctttctggtctgttgacaaccttcatgtattgggaacttgctgtttttggggtccagctcattgctttaaaggtatcatcatgacaacatcttgaggctcaggtatctgcaattttgtagttaagaacttcaggtcagagaggttactagtgatgccatcttccttgatctctgcttatttcttctctgatctcataatctgatatcaggtgtttatgacagtggttttcagagggggaggtagatcaaattcaccctcaagggacatttggyaatgtctggagacattttgtgatggtcayagccaggttggggttgaggggctgtgctcctggcatcttatgggtagaggccagggattctgctgaacatcctgccatgcataggatggccccacaccaagagttacctggccccagatgccagtagtgctgaagtcaagaaaccctgtgttatgagaatgtaccagatactggtggtggagtggaaggtctggtggtgacttcagcaggacaagagttgttaagggaggctgagtagccagagaaatgaggagaggggccatcctaggccgtggtggggaatgcaggctgattcctaatccatctccctctgtgttctctgtggtgattcatcctatggccacacagatgcacagagagctcttagagccacagatgccagcacagagagctagattttccccaaaagtgcataaatgcacccaacaggtagattttaaagtgtggtttttcagcagttgtagcatttccctgttatttcagggctctgaatatacctctgtgacttgaaagtgatcgtgaaaaatacctgatttactctgtggtgagacaacagatgttaaagacagcttccctgatgttaggctataaagctaggcgtttctccctcctcacagcaaagttttacatatcaggttcaactttctgaacccagcttgtaccacggtaaagagatgggttcctctgagggttgggttctgctattttcctctctctctctctggcagcatcggacctttggggtcctgaggtttggctcttggaccttcgggaggcatcccagtgagggaatcgagggactttgatcttcaccacagccctctcactagtggatgttatgttctcccccaccagattgtatttaagaagaggctgcatagacaggaaaactttgaggagctatatgaaggaaaacaggaccaaattaaaccagttcccttgtgagtgcactgggaagtgattggaagtgatgcccacaagatgactgagataccttaattgcaggtgtggaaacagtcctgcaaaacgcctgtgaaaatagaaatatagtggacactaaggcagagcggcagcctgcagcgtgcagaaacacgggaatcatgagacatcttgaaatctgtaaaacatccgcaggccttgactcacatctggaatgtgacatccacaaccagaattgtcttacatcttactcagttcttggcacagaataggtttcagtattaatagcagtgggagccatctttacattttctaacctggcttttgattgtattcatcttattaatgatgtcatgtagaatctcattttacctttatcattattcatttctttcttgccttttcatctttgtggttctagtgcctttatggtccaagtgaaagttgaggtatacaaaatataaatcttaggagaacagctctctgaagaaaaaagcacaacaaaatgtaaatcagaggagaggtgattatcatggtcatatgggaattctttttttttttttttttttttttttttttgagacggagtctcactctcactctgtcgcccaggctggagtgcagtggtgtgatctcggcttactgcaacctctacctcccgggttcaagtgattctcctgcctcagccaccccacgcccagtcggtcatatgggaattcttcatataaaagcattccttgtggcccggcgtggtggctcatgcctgtaatcccggcactttggggggccgaagcgggcggatcacttgagctcaggagtttgaggccatcctggccaacatggtgaaaccccgtctctactaataatacaaaaattggtgggcgtggtggcatgcacctgtaatcccagctattcaggaggctgaggcatgagaatcacttgaataactcgggaggcggaggttgcagtgaactgagatcacaccactgtactccagcctgggctctagagcaagactgtatctcgggggaaaaaaaaaaagcgatccttgggtttccatgtgttcctaatatttgtggcttaccagatttaaagcatgctcctttcagagtacatagattaaaatatgcacctacattgtccatttgaggtaattgtagccatataataattttccaaattttagttgttcttggtggttgttgcaataacgtatgtaccagccaaatggttacttttttctttaagtaaatcagctttttatttatttatttttttgagatagggttttgctctgtcacctaggctggagtgcagtggtgtcaatggctcactacaaccttgacctcgtgggctcaaacgatcctcccaactcagcttcctgagtagctaggactacaggtgcacaccacagtgcctggcaaatttttcttttctttattttttttttctttctgtagagatggggttggcggggggcatctcactgtgtcacccaggctggtcttgaactcctgggctcaggtgattcacccacctcagcctcccaaagtgttgggattgtagatgtgagccactgtgcccggcaaaatcagcttcttaacagccttttcttttaaacgtaaatattattttgccataaatggagtatcattcagcttaaatagaaatataaaaagcattaacaaagctacaaatttaatctggggggaaaaaatcaatggtaccattcatctgttaatagttttggaataaccagcctgagagtcaattcacatgtgtacacttgtaaagtataaaagctattttaccattttctttattttggttgaataccaataatttctaatcctggcaatgagggtggcttgggtctccaggagccaccagcagccattctctggaatctatctgaatgtgtcaaagtatgtgtgtagtatccagacagtgggataagagggccctttgccacacattgctgccatctgctatggaaaatgaaaccctatttcatgtgttttcagttctcttcataatgtgcaaaatattttcagtgagttttcagattaatatttgtctcagtcatgtagacaacaacaaaaccgtcctgtgttttgttgttcagatgtgaccccacaggtctacttctgtgctcacaagggaatttctctcttcttgcatgtccagtaccaccttgtaaggataaattcaggtgctttaaatgaacaaataacttagcagaatacactgattcctgaagcctgcccaattccttctgtgctctgacgtagacatggctgtgcattgtcgtaagaagtcgacaccacctatctctatagaaagcagaggggaaaagtgcaggattcagcagcttttcttaacaaattgtaacattttgagttggcttccatatataaacaaggagtagataagtttattttagcattttagcaaaaacacttagtaatttagtatatttccgtgacatttacctttaagactctttttaattacctaattgatcttatccatgatgggttcaacacaaagaacaaatattcagagaacagtcccaattccatttccaaattatgtatacttaaacataacatacctactaaaatattgctggcttctaggggtgacttttggtctgtcactggtaagagtgcatggatacacatggaaagtcagtgttcagaaatcttgattggcattcatgcatgccttccatactatctgtagtccttttctcttgtaataaaatacatgtaacctaacatttgccattataacaattttaagtatataattccctgacgttaatcacaatgttgtatttgtatctccaaaacttttaaattcccccaaacagaaactttgtaaccgtaaaatgtatgtaacctaacatttgccattataaccattttaagtatacaattccatgatgttaatccaatgttgtatttgtatctccaaaacttttaaattcccccaaacagaaactttgtaaccggtaaaatatacgtaacctaacatttgccattataacaatttgaaatgtacaattccatgatattaatcacaatgttatatttgtatttgtattttatttgtctctccaaaactctttaatttccccaaacagaaactctgtaaccattatgtaaaaactccccattcgcttcccccagtccctggaaatctctattctactttctgcctcagtgaatttgcctattctagatatttgmtataagggagatcttgtagtatttgtccttttgtgtctggcttccttcacttagcataatgttttcaaggttcatccgtgttccagcatgtatcagcactttattcctgtttatgactgaataatactcttacatagatacaccacattttatgtatccattcatcttagtggacatatgcgttgtttccatattttggctactgtgaatgctaccatgtaccttgataattccagtatataattgagtccctgttttcaggtatttggtatatatgtctaggagtgggtcctgtgggttgcatggtggatcattgttgggtcatatggtaattcgatgtttaactttttgaggagctgtcaaactattttacacaatgaccacaccattttacatttccactagcagcgctcggctcggcagcacttattttccatttttaaaattatagtcatcctcatagatttaaagtagtatttcattgtgattttgatttgcattttcctaatgagtacgatgagcatcacttgatatgcttattagctatttgtatgtcttctttggagaaatgtctagtcctttgcccatttttcattgggttatytgtcattgttgttgagttttgttgagttctttatatattctggttattaagcccttaccttaccagataygatttgcaaatatttttatgttggcttttcacttgcttgataatgtcctttgaaacacacaagtttttaattggttaaagttcagtttacctatttttttttcttttgctgttcatcctttgggtgacatatccaactgtttctttttcaagattgttttgactttctgggaccttttgcaagtccatatgaatttgagtacaagcttttccgtttctgcaaaaaaggctgttggattttttttttctttgaaacagagtctcactctgttgcccaggctggagtgtggtggcatgatctcggctcactgcaacctccatctcctgagttcaagcaatttttgtgcctcagcctcctgagtagctgagattacaggtgcccaccaccaagcccagctaatttttgtatttttagtagagacagggttttaccatgttggtcaggctgttctcgaactcctgacctcaggtgatccgccagcctcggcctcccaaagtgctgggatttcaggcatgaatcaccgtgccccactagctgttggaattttgataggccttgcatgaacctatcacttttggttagcatgcattgctagtatatagaaacactctgatttttgtgtgttatcctgcaactttgctgaatttattagctttagtagcattcctgtggatttttcaggattttctatatataggatcgtgtcctatatatagaattgtgaatgartagtgatagttttacttcttttcaatttggatgccgtttgttttttgtctaattactctggctataacttccagttatacacttcacaattgagtgtattagctgtgagtttttcataaatgtccttatcatgttgaggaagttctcttctattcccagtgtgttgaatgttttaatcatgagttagattttatcagtgccttttctgcattgattgaggtgatcctgtggttttcctttctttgatttttmtaatgcaatatattacattgattgattttctcatattaaaccacccttgtattcctgggataaatcccatttggttataatccttttagatgttagatttggtttgctcgaacagccaatcctcattattcatggattccatatttgcctatttgctaaaatttatttgtaacccaaaaattaataatgcagtggtttcatggtcatttatacatacacctagaatggcaaaaaaaaaaaaaaaaragagagtcacctgacacacatcttcctagctgagactgcccataacaacacactgccttgtttcagctgtgagaccaccagcgggtggaagtgatgggggtaatgcagtgtagtaccaaaacctttggcctcagagccacttgaagtggtttaaatctcaactctggcacctgttagtgggacggtctcaggcaagtcacttaacatttttgagtttcattttctccattctgtaaaatagaatcgactaggatcagttgtttgtaggattataatctatgtgagatatgtgtgtgcatatttaccttatgagcaggtggtttagtatccattgattcaatggtcctcacctttatttctaattttagttatttgtgtcttttctttttttctctgtccagctaatggtttctcaatttttattgagttcttcaaataaccaactcttaatttcattgatttttcttttcttctattctctatgtatcttacccgtaatctttattattttcatccttctggtaccttcgggtttactttgctcttctttttctagctccttaaggtgtaaagttaggctgctgacatgagatctttttttcttttttaatgtaacctttacatctataaactttcctctgaccactgccttcactacattgcatactttttctgtgttgtgattttgttttcatgcatccctaagtgtcttctactttcccttgtgatttcttttttgacccatggttgttgaaggagggtgttgttttaatttccacatatttgtggattttcccatttttcttttggtgttaatttctagcttcattccacaagataactttgtaagatttcaatttcttaaaatgtgagacttgttatgaggtctgacatttggtctgttctggaaaatgattcatatgcacttaagaaggtatattctgctgtttggtgaagtgttaggtctagttggtttatagtgttgtgcaagtcctgttttgatcttctagataatctgtcctgtactgaaaatgtagtgtattgaattctccaactgttattgtaaagctatctttttcccttcagctttgtcaatatttgcttcatgtattttggagcactgttgtttggtgcttacatgtttataattgttatattttcttgttgaactggcctttatgtcaccatcttttgtgtcttgttacagtttttgacttaaagtctrttttgtctgatattagtgtagccacctccagctttctcttgcttactatttacatttaatatattttttactactttcyctttcaacctttttgtttttgaatcttgagtttcctgtagataacatatagttatataatgtttttatatccattctgccagtctctgccttctgtcagaaaagtttaatttacatttcaagttactactgacaagcacttcttccatgttgctatttgttttctgccttatacttttgttcctcattgccttaattactaccatttgtgattagttgatcttttttctttttaataatggattgtttggattcccttctcatttccttttgaatatatagcttttagatattttctttgtggttatcatgggaattatatgtaatatccacaattgatgttgttgtttaagtcaatatcagcttcaatagcatacaaatgtctgtctatacagctccatctgctccctttatgttcttacaaagtacatattttatgcattgtgtgctcaataacatggattgataattatttttcatgcatttgtccttttttttcttttttgagacagagcctcactctgtcacccaggctggagcgcagtggcatgatctcggctcactgaaacctctgtttcccagggtcaagtgatctcctgcctcagcctcccgagtagctgggattacaggcatgtgccaccacgcctagctaatttttggattttaagtagagacggggtttcaccatgttgactaggctggtctcaaactcctgaccttaagtgatccgcccacctcgtcctcccaaagtgttggaattacaggcgggagccatcgcacccagcctgtgtatttctcttaagtcatgtgtgaaagaaaaagtacattcaaaattcctaaatacagtactactggcttttatatttgctcatgtatttaccattaccagagagctttatttctttttcagctttgagttactgtttagcatgctttcacttgaagcatttctttcagggaaagtctagtggtgatgaacttcctcagcttttatttatctgggaatgtcttactttccccctcagtttcaacgttagtttgctggatataggacttttaacaggttttttttttaactttcagcttttttttttttttttttttaagagattgggtcttgctctgttgcccaggctggagtgcggtggcatgatcatagctcactgtaagcctcaaactcctgggctcaagtgatctcctgcctcagcctcccaagtagctgggactccaggtgcacaccaccatgcctggcttcagcattttaaatatgttgttccattgatttctaccttccatgatttctgttgagaaatcagctattaatcttattaaggataccttgtgcttgtcaagtcacctcctgctgcttttaggattttctttttgtcttttgcttccaatagtttgattatgatgtgtctcagtgtggatctttttgagcttattcggcttggaattgattggctttggataagtaaatcatgtctttcttcagatttaggaagctttgtccattatttatttagataatcactttgtccctttcttttctcccaagtcttccataatttatttgttggtatgcatgatggtgtcctgctagcctactaggctctgttcattttttctttattttctttactttctacttttcagattcagtaattttaattgtgctatcttcaagttcgttgattaatttttttctgttaaaaactttctgagcctctctagtgaattttttatttcaattatgtacgtttcagctccagaatgtttgcttggttcctttataaaatgtgtttctttattttgtttataaattgttctgatttccttcagttcttcatatctttcttttgctttttgagcttatttaagacagtctgcctgggtttccttctggctggtttctgtcaattattttattattttgaatgaattgtacttccctatttctttatatgctttgtggggtttttgttgttgttactgttgaaaactgcacatttgacattataatgtaattctggaaatcagattttcttccttgttttgctgggatttttttgttgttgttgttgaaggctagaattggctgtttagtgacatttccacactattctgtagagactgtattccttattgtttgtggtcactgaagcctctgttcctcagattgtgttccactgtgttttggcagagatttctttggaagcctggagctaagcaaacaaaacaaaacaaaacagagcacttctcctagtttttgcatttaactctgtgactccaggtttgcattgagccaggtgatcagtctgaggtgaaagccragaaacttctcaggtctttctgagcgtgcatcttgccctgggcttgtgcatggctgtctttccccttacacccacatgctttagaatgtcctgatcttccaaagaaactctcctgcagcttttctgggggtgcctgtggacttgtttgtatatctcaacttgatcatttagcctaggtgtttgtgggtgttagtttgtgaacaatctcccccatttttctggcttaagggsccaagttcagatgtcgtgccgtggtcttctagatagccttcagtcaggttagaacatacctacacaatwatttgtgaataaggttggctgtgctccctctagaaccaggaaccagggactttcccactgggaatgcaggctgtcaggccagggaggcacrgcaagtacaagtaaaaataccacaaacctttcctgtaattttgaagttgctagcttcttgattcaatgttcacttgtctgctgccaatctttgacttatttccagagtcctgataatgttggttgtaagaataattgctgttttttggaaatgtttctgtatgagaagtcagagcttcctactctaccaagtctgcccctgtctgtacatctgaatggttgtggtggaaagtcactgacaattttcaatattcaaggtgtgcgtaagcaccatccctgcaactgtgagtctgtgtaaaagggcttatcaccgcactacccatttaaacaattggcgctggcttatgattcttctaattatataataaacagtgttaataaatctaaatattcatccttatgccatctagaagtcatctggtggaccactaggaggatgtacatcatgctttgggaaactctcttctgccataagtacagatcttggctggcattgatagttttccttccccagccccctgctatattctagatcaggctaccccattgtgtctgtggtcacagccacatttactggcaggcactccacaactcaggaatagtttgtgttctgaagctttttgttatttttaaattggtgcttgatctggaaactttgaaatatgttattcataaggcttaggtttcttttatttatttattttaattttttattttttcattattatactttaagttttagggtacatgtgcacaatgtgcaggttagtgacatatgtatacatgtgacatgctggtgcactgcacccactaactcgtcatctagcattaggtatatctcccaatgctatccctcccccctccccccaccccacaacaggccccagagtgtgatgttccccttcctgtgtccatgtgttttcattgttcagttcccacctatgagtgagaatatgcggtgtttggttttttgttcttgcgatagtttactgagaatgatgatttgcagtttcatccatgtccctacaaaggacctgagctcatcattttttatggctgcatagtattccatggtgtatatgtgccacattttcttaatccagtctatcattgttggacattagggttggttccaagtctttgctattgtgaatagtgccgcaataaacatacttgtgcatgtgtctttatagcagcatgatttatagtcctttgggtatatccccagtaatgggatggctgggtcaaatggtatttctagttctagatccctgaggaattaatgcctaggttttcttctagggtttttatggttttaggtctaacatttaagtctttaatccatcttgaattgatttttgtataaggtgtaaggaagggatccagtttcagctttctacatatggctagccagttttccctgcaccatttattaaatagggaatcctttccccattgcttgtttttctcaggtttgtcaaagatcagatagttgtagatatgcggcattatttctgagagctctgttctgttccattgatctatatctctgttttggtaccagtaccatgctgttttggttactgtagccttgtagtatagtttgacgtcaggtggcgtgatgcctccagctttgttcttttggcttaggawtgacttggcgatgcgggctcttttttggttccatatgaactttaaagtagttttttccaattctgtgaagaaagtcattggtagcttgatggggatggcattgaatctataaattaccttgggcagtrtggccattttcacgatattgattcttcctacccatgagcatggaatgttcttccatttgtatcctctttaatttcattgagcagtggtttgtagttctccttgaagagrcccttcacgtccsttgtaaggtggattcctaagtgttttattctctttgtagcaattgtgaatgggagttcactcatgatttggctctctgtttgtctgttattggtgtataagaatgcttgtgatttttgtacattgattttgtatcctgagactttgctgaagttgcttatcagcttaaggagattttgggctgagatgatggggttttctagatatacaatcatgtcatctgcaaacagggacaatttgacttcctcttttcctaattgaataccctttatttccttctcctgcctaattgccctggccagaacttccaacactatgttgaataggagtggtgagagagggcatccctgtcttgtgccagttttcaaagggaatgcttccagtttttgtccattcagtatgttattggctgtgggtttgtcatagatagctcttattattttgagataagtcccatcaatacctaatttattgagagtttttagcatgaagcattgttgagttttgtcaaaggccttttctgcatctattgagataatcatgtggtttttgtctttggctctgtttatatgctggattacatttattgatttgcgtatattgaaccagtcttgcatcccagggatgaagcccacttgatcatggtgaataagctttttgatgtgctgctggattcgttttgccagtattttattgaggatttttgcatcaatgttcatcaaggatattggtctaaaattctcttttttggttgtgtctctgcctggctttggtatcagaatgatgctggcctcataaaatgagttagggaggattccctctttttctactgattggaatagtttcagaaggaatggtaccagttcctccttgtacctctggtagaattcggctgtgaatccatctggtcctggactctttttggttggtaagctattgattattgccacaatttcagatcctgttattggtctattcagagattcaacttcttcctggtttagtcttgggagagtgtatgtgttgaggaatttatccatttcttctagattttctagtttatttgcgtagaggtgtttgtagtattctctgatggtagtttgtatttctgtgggatcagtggtgatatcccctttatcattttttattgcgtctatttgattcttctttttttctttattagtcttgctagcagtctatcaattttgttgatcctttcaaaaaaccagctcctggattcattaattttttgaagggttttttgtgtctctatttccttcagttctgctctgattttagttatttcttgccttctgctagcttttgaatgtgtttgctcttgcttttctagttcttttaattgtgatgttagagtgtcaattttggatctttcctgctttctcttgtgggcatttagtgctataaatttccctctacacactgctttgaatgcgtcccagagattctggtatgttgtgtctttgttctcgttggtttcaaagaacatctttatttctgccttcatttcgttatgtccccagtagtcattcaggagcaggttgttcagtttccatgtagttgagtggttttgagtgagtttcttaatcctgagttctagtttgattgcactgtggtctgagagatagtttgttacaatttctgttcttttacatttgctgaggagagctttacttccaagtatgtggtcaattttggaataggtgtggtgtggtgctgaaaaaaatgtatattctgttgatttrgggtggagagttctgtagatgtctattaggtctgcttggtgcagagctgagttcaattcctgggtatccttgttgactttctgtcttgttgatctgtctaatgttgacagtggggtattaaagtctcccattattattgtgtgggagtctaagtctctttttagatcactcaggacttgctttatgaatctgggtgctcctgtattgggtgcatatatatttaggatagttagctcttcttgttgaattgatccctttaccattatgtaatggccttctttgtctcctttgatctttgttggtttaaagtctgttttatccgagactaggattgcaacccctgcctttttttgttttccatttgcttggtagatcttcctccatccttttattttgagcctatgtgtgtctctgcatgtgagatgggtttcctgaatacaacacactgatgggtcttgactctttatccaatttgccagtctgtgtcttttaattggagcatttagtccatttacatttaaagttaatattgttatgtgtgaatttgatcctgtcattatgatgttagctggttattttgctcattagttgatgcagtttcttcctagtcttgatggtctttacattttggcatgattttgcagcggctggtaccagttgttcctttccatgtttagtgcttctttcaggagctcttttaggacaggcctggtggtgacaaaatctctcagcatttgcttgtctgtaaagtattttatttctccttcacttatgaagcttagtttggctggatatgaaattctgggttgaaaattcttttctttaagaatgttgaatattggcccccactctcttctggcttgtagagtttctgccgagagatccgctgttagtctgatgggcttccctttgtgggtaacccgacctttctctctggctgcccttaacattttttccttcatttcaactttggtgaatctgacaattatgtgtcttggagttgctcttctcgaggagtatctttgtggcgttctctgtatttcctgaatctgaatgttggcctgccttgctagaktggggaagttctcctggataatatcctgcagagtgttttccaacttgattccattctccctgtcactttcaggtacaccagtcagacgtagatttggtcttttcacatagtcccatatttcttggaggctttgttcatttctttttatttttttttctctaaacttcctttctcgcttcatttcattcatttcatcttccatcgctgataccctttcttccagttgatcacatcggctcctgaggcttctgtattcttcacgtagttctcgagccttggctttcagctccatcagcccctttaagcacttctctgtattggttattctagttatacattcgtctaaattttttttgaagtttttaacttctttgcctttggtttgaatttcctcctgtagctcgtagtttgatcgtctgaagccttcttttctcaactcgtcaaagtcattctccgtccagctttgttccattgctggtgaggaactgcgatcctttggaggaggagaggtgctctgctttttagagtttccagtttttgtgctctgttttttccccatctttgtggttttatctacttttggactttgatgatggtgatatacagatgggtttttggtgtggatgtcctttctgtttgttagttttctttctaacagacaggaccctcagctgcaggtctgttggagtttgctagaggtccactccagaccctgtttgcctgggtatcagcagtggtgtctgcagaacagtggtttatcatgaaccacgaatgctgctgtctgatcgttcccctggaagttttgtctcagaggagtacccggccatgtgagatgtcagtccgcccctactggggagtgcctcccagttaggctgctcaggggtcaggggtcagggacccacttgaggaggcagtctgccagttctcagatctccagctgcgtgctgggagaaccactgctctcttcaaagctgtcagacagggacatttaagtctgcagagcttactgctgtctttttgtttgtctgtgccctgcccccagaggtggagcctacagaggcaggcaggcaatcctccttgagctgtggtgggctccacccagttggagcttccaggctgctttgtttacctaagcaagcctgggcactggccggcgtccctctcccagcctcgttgccgccttgcagtttgatctcagactgctgtgctagcagtcagcgagactccgtgggcgcaggaccctccgagccaggtgcgggatataatctcctggtgcgccattttttaagcccgtcagaaaagcgcagtattcgggtgggagtgacccaattttccaggtgccgtctgtcacccctttctttgactaggaaagggaactccctgaccccttgcacttcctgagtgaggcaatgcctcgccctgcttcggcttgcgcacggtgcgctgcacccactgacctgtgcccactgtctggcactccctagtgagatgaacctggtacctcagatggaaatgctgaaatcacctgtcttctgcgtcgctcacgctgggagctgtagaccggagctgttcctattcggccatcttggctcctccccaaggcttaggtttctaagtcagccacaaatgctacccaaaactacataaagaagaaaaaagttgcatagaaccaaaaagtgagttttaattatttattttatacgtgtgctttcagaattccaaccccctagaggagttgggattttaaaccagtgtgatacattttctgtttgcttcagtttactttttatttttttcctttcccttatgggttctgggaattgagacttcggctttccttcctgtgataccacttgccactgtgtgtccattcgagagcatggctctcaccagcctctcccctctcctgtttttgcagtcagtactttgtccttctaaagtcctttaaaagattgctcattagaatatttttaaaatctgttagcaatagataattacagccttatttctatgctgaccaccatgcagcaaggaaaaatgtgcaaaggaaaagaggcagaaaagaactgtttatattgaatttaggggctgtttcaggccttggtatgctggtctctagtgtggctgaaggaaaaaatgctgggactgagtgcgaggaagggcagtgagtacatttctgattctggcaccttgatggagatggtcctatcacttgtagaccttgcgcctggttacagaattggggatacagaagtttgatggaacaaaatggaattatgtgagtgccctggaatggagtgatgggtgtgggtgcaggtatgtgtgtctgctcccacctctgctgggtggaagtctctctcatgagagtgagggcagcagtggtgttcacctgtatatccccagtacctcgtacagtgccttatacatagcagacactctcttgctgaataaatgaggatccagataagatakgtcaatcattgttaaaggcatagacctgagtcagtgggtattacatgttcagggatatgaattggcaatttgttttattttactaatttgcttctgtgtacattcctcacagtgttacaacttgagtgacaatataatttatcattcaaatggaggcacatgaaagcaaaaggaggactgaaaattgttatacaatcttttggaattttttttgaccaatacatttgttgtagtgatagacataaagtagttttattaaaaaaattttcaaaaaattatgaagtaaacgtcagtgcgttacaataaagggatcacctgtacattacaaaaattagtaaatactcttttttttgttgtcgttgtttttttttttttttggagacagagtcttgctctgtcgcccaggctggagtgcagtggcacgatcttggctcagtgcaacctccacctcccgggttcaagcgattctcctgcctcagcctcatgagtttctgggattacaggcgagtgttaccatgcctggctaatttttgtatttttagtagagacgaggtttcatcatgttggtcaggctgctctcgaactcctgacctcgtgatccacccacctcagcctcccaaagtgctgggcttacaggcacatgagccaccgcgcccggcctcttattttttcttttcccgttggtttaagacagagtcttgctctgtcgcccaggctggagtgcagtggcatgcacatggctcactgcagcctctgcctcccaggctcaagtgatcccaatacctcatcctctccagtatctaggactacaggcgtgcaccaacaaacccagctaattttttttttttttttaaatagagatggggttttgccatgttacccaggctcatctcgaactcctgggctcaagcaatccgctttcctcatccttcaaaagtgctgagattacacttgtgagctatcacaccaggctgtaaatattcttgatacatttttatcatgtatctattgtaatgccttgtgactctttaaaagtttttcggtatgtctttttatttttttattttaataggtcttttgggaacaggtggtgtttggttacatgaataagttccttagtggtgatttctgagattttggtgcacccatcacccgagcagtgtacactgtactcaatgtgtcgtcttttatccctcacccccctcccaccctttcccccaagcctcaaagtccattgtatcattatgcctttgcatcttcatagcttagctcccagttatgagcgagaacttaggatgtttggttttccattcctgagttacttcatttagaataatgatctccagttccatccaggttgctgcaaatgccattatttcatttctttttatggttgagagtattctatggtatatatacaccacagtttctttatatacttgttgactgataagtatttggctggttccatgtttttgcaattgcaaatataaacgtgtgtgcaagtgtctttttcatataatgacttcttttcctctgggaagatacccagtagtgggattgctggatcagatggtagttttagttcctttttttttttgagacagagtctccctctgtcacccaggctggggtgcagtggtgccatctcagctcaatgcagcctccacctcccgggttcaagcgattctcctgcctcagcctcgtgagtttctgggattacaggtgagtgttaccacacctggctaatttttgtatttttagtagagacggggtttcaccatgttggccaggctggtcttgaactcctgacctcatgatcctcccgcctcggccttgggattacaggcgtgagccaccactcccggccttacttttagttctttaaggaatcctcacactattttccatagcagctgtactagttcacattcctgccagcagtgtgtttcctttttttaccacatccacaccaacttctattattttttgatttttcgattatgaccatcttgcaggagtgaggtggtatcgcattgtggttttgatttgtatttccctgatcattagtgatgttgagcattttttcatgtttgttggccatttgtatatcttcttttgagaattgtctgttcatgtccttagtcccactttttgatgtgattgtttttttcttgctgatttgtctgagtcatttgtagattctggatgttagttatttgtcagatgtatagattgcaaagattttctcccactctgtgggttgtctgtttactctgctgattgtttattttgctttacagaagctttttagttgaattaagtcccatctatttatctttgtttttgttgcatttgcttttgggttcttggtcatgaagtctttgtgtaagccattgtctcaaagggtttttctgatgttatcttctagaatttttatggtttcagtcttagatttaagtgtttgatccatcttgagttgatttttgtttaagatgagagatgaggatccagtttcattctcctacatgtggcttgccaattatcccagcaccatttgttaaataaggtgtcctttccccactttatctttttgtttgctttgttgaagatcagttggctgtaagtatttgactttatttttgggttctttattctgttccattggtctatgtgcttatttttataccagtaccatgctgttttggtgactatggcctggtagtatagtttgaagttgggtaatgtgattcctccagatttgttctttttgcttagtcttgctttggttatgtgggcagttttttggttccatatgaattttaggattttttttctagttctgtgaagaatgatggtggtgttttgatgggaattgcattgaatttgtagattgtttttgacagtatggccattttcacaatattgattctacctctccatgggcatgggatgtgtttccatttgattgtgtcatctatgatttctttcagcagtgttttgtagtttttcttgtagaggtctttcacctccttagatccactcctaagcatttttttttcaactatttttaaaggggttgagttcttgatttgagtctcaccttggttgttgttggtgtatagcagagctactgatttgtgtacattagctttgtatcctggaactttgctgaatttatcagttctaggagctttttggaagaatctttaggagtttcttggtatatgatcatgtcatcagcaaacggtgacggtttgacttcctctttactgatttggatggcctttctttctttcttttgtttgattgctctggctatgacttgcagtatgttgaatagaaatggtgagagtgggcatcctcgtcttgttccagttctcaggggaatgctttcaacttttcaccattcagtgttatgttggctttgggtatgtcatagatggcttttattaaagttatgtcccttctatgctgattttgctgagggttttaatcgtaaaggggtgctggattttgtcaaatgctttttctgctctattgagatgatcatgtgatttttatatttttaattgtgtttatgtgatgacaacattgacttgcgtattttaaaccatccctgcatcctgatatgaaacccacttgatcatggtgggttatctttttgaagtgttgttggattcagtttgctagtattttgttaaggatttttgcatctatattcatcagcgatttttttgttttgttatgtttttgtttgttttttgttttgtttttttgttacatcctttcctggttttggtattagagtgacactggcttcatagaatgatttaggaaggattccctctttatcttgtggaatagtgtcaataggattggtaccaatttttccttaaatgtctgataaaattcagctgtgaatccatcaggtcctggacttttttttgttggcaacttttaaattaccatttcagtgtcactgtttgttattggtctgttcagagtttctgtttcttcctggtttagtctaggcgggttgtatatttccaggaatgtgtccatttcctctaggttttttagtttatgtgcataaaggtgttcgtagttggcttgaataaacttttgtatttctgtggtatcagttgtggtatctcctgtgtgaattctagttgagagttttggatcttctccttgtcttggttaatctcactaattttatttatcttttgaaagaaccagctttttgtttcatttaccttttgtatttattttttgttggaatttcatttagttctgttttgatctttgttatttcttctgctgggtttgggtttggtttgttcttgtttttatgattccttgagatgtgaccttagattgtctatttgttctctttcagacttttcagtgttaggcgtttaagcatatgaactttccacttagcattgcctttgctgtatcccagaagttttgctaggttgtgtcactattatcgttcagttcaaagaattttaaaatttccgtcttgatttcattgttgcctgagtgatcattcaggagcaggttatttaatttttatgtttttgcctggttttgagggttcctttttggagttgatttccaattttattccactgtggtctgaaagagtacctgacatagtttagattttcttaaatttactgaaccttgttttgtggcctatcatatgggctatcttggagaatgttccatgtgctgattaatagaatgtatattctgcagttgttggataaaatgttctataaatatctgttaaatccttttgttataagttatagtttaagtccattgtttctttgttgactttatattaatattatattaatattaataataaattattaatataaataaattaattatatttgtattatttgtaatatataatttatatatattatattaatattcatatttatttatatataattatatattatttatatcatatatttatattatttatatataaacttgttaatataaaattatattacttatatattataaatatattatattatataataaattattaatataaataatataaataataatatataattatatataaataatactaatattaatataaataaaaataaatattaatataaatatctgttaagtccttttgttataagttacagtccattgtttcttcgttgactttctgtcttgatgacctgtctagtgctgtcagcagagtattaaagtcccccactatatattattattgtgttgctatctcatttcttaggtctagtagtaattgttttatatgtttaggagctgtggtgttaggtgcgtatatatttaggattgtgatatttttctgttggactagtccttttatcattatataatgcccctctttgtcttctttatctactgttgctttaacatttgttttttctgatataagaatagctactcctgcttgctttttgtgtcctcttgcacggaatgtctgtttcacccgtttaccttaagtttatgtgagtacttatgtgttaggtgagcctcttcacaacagatactaggtgaattcttatccattctgccattctgttctctttccagtggaggtatttcagttactattgagatgctaggtattattctattcattgtgctatgaatacacaacatgggaacgaatatgaaaacccttgtgggtttttttttccattatgttattgctatatagttcctgtgagatttatgctttaaggaggttctattttggtgtatgtcaaggatttgtttcaagatttatatctccttttagcagtttttgtttcaagatttatatctccttttagcagttattgtagcgctggcttggtattggcagattctctcagtatttgtcttaaaaagacggtatcttttcatcatttatgaagtttagttttgctggatataaaattcttggcttataattgttttgtttaaggaggctaaggatagccctccccaccccaacccctagtcccttctagcttgtagggtttctgctgagaaatctgctgttaatctgttaggttttcctttataggttacctggtgcttttgcctcacagctcttaagattcttttccttcatctyaactttagataacctgatgacagcgtgcctaagtgatgatctttttgcaataaatttcccaggtgttctttgagcttctcgtatttggatgtctagatctctgtctagcaaggccggggaagttttcctcaattattccctcaatatgtttttcaaacttttagatttctcttcttcctcagtaacaccatttattcttaggattggccatttaacataatccccaacttctcagaggctttttctttttttttttttttaattctttttttgtctttgttggattgggttaattcgaaagccttgtctttaagctctgaagttctttattctacttgtttgattctgttgcttagacttctgagagtattttgcatttctctaagtgtgtttttcatttccataagtcgtgattattttttatttatgctatttatttcactgaagattttctccttcctatcttgtatcatttttatggttttattaagttggactttaccattctctggtgcctccttgattagcttaataatcgacctgctgaattctttttgtggcaattcagagatttcttcttgttttgaatccattgctgttgaggtagtgtgatcttttggtgttgttaaagaaccttgttttgttgtatgacccagaattgcttttctggttctttctcatttgggtatactatgtcagagggaagatctggggcccaaaggctgctattcagattcttttgtcccatggggtgctcccttgatgtgatactctctcccttcccctggggatgtggctttctgagagccaaaccgtggtgattgttttttctcttccggatctagtcaccctgcagagataccgggctctgggctggtactcgggagtgtctgcacagagtcctgtgatgtgaaccatcttcaggtctctcaactgtagataccagcacctgagcgtgcttaattgtggtttggttttgttcattgttactagttttgtgttggttggcctccagccagtaggtggcgctgtcaagagagcatcagctgtggtagtatagggaggatcaggtggtgtgggggccctagagctcccgggagattatgtcctttgtctttggagtttttcagctgtcccctggggcctgcagcagcaatctgcttccttcagagggtttgtggattctcttggctttcctggtacgttcctgccgtagttcttggagcaaaagttaaggaggtgagtccccacacgctgctctgtccgtccgagtgggagctgcaaattagtcctgcctttctgtctgccattttccttgtgactctgaagaatatttttcccccaacatgggtttgtttctgagattctcataaaagtacatacttcttaaaagttgcattttcagttagtacatttgagattgttgacatttggattttattcttctgtaagccatcattttattattgaaaaagtttatttgtgctgaggtaaggtagcttatgagttcagagcaactagtgctaaaggaaggctattttgttgtttttttaatgagatgtgaagtattatagctcaaatattttcataagaactgtctaaacctctatttagaatacctatattcaacaaataattttgcaagacaaaaaagttgtcaaataaattgcctttttcattcttttgaatcttttgctaaatttagatgctgtaaaatgttgtttttatccaatcaaaaatagaagggccatgaaattattctttctacaatttgagatactccaaagtgcacttactgaatttcaaaattattgtacattgctctatatattccatttttgtctgtcacttgatatttttagaggttaatttcactgcatgcttacttgcaaactttgatttcaacaattgcagtttgccaaaaggttcaaaagctgacttttcaaaagacagttgtttgttgaaagttttgatcaaaatttccagctgattttgaacaaaaggtaacccaatcttagaggtctcaccaaaacaaaacaaaacaaaaggttccaagtcattttgcgatgcctggattggttttcaaagtagttttttgaaggctaaatgagttgagtgccaaagagaatgggtactgccatgatgaagtattcttaactttagtttaatttgttcttcgttattgtgtatatgaaaacctgtatttgtattaaaatcagaataacaaatagtgttcctcattgagcttttacgatattattaacagtagtgtttaaccttttaaggcaggattcagcaaaccttttctgtaaggggtcagacaataaatattttacgctttcttggccacagctatctattgcaactcaacttctgccttggtagccttaaagtagctatagacagtatgcaaacaaatgagtgtggctatataccaatacaactttatttatggagactgaaatatgaattttgtatacttttcatatatcacaaagcatcaacttttgatctttttccaaccgctgaaaacgtaaaaaccattcttactttgcaggccatgccgaaacaggtggcagggtggatttggcccgcagaccaatttgttgacccttgttccacgagttgaatgaaaaaaatagaactactaacggaactgatctcctatttgaaaactggcacaatctaattgcctgtaaagttcttccaagctaaaggagccaatatttaactgctattatgtatgtgtttaatgttcaggagaacatttaggggaaaaattggcttaattatgttagaacagtcatttgatctaaatgaacagtcatactttagaaagaaatgtgaatactacaattttataaatgcaaattctgcgattgcacctaagaattagttgtctttgggtactgccttcttaaaaaaaaaaaaaaaaggkggatatggctattttttcagatgttgtctggttttcatgtgcccactgatagcaccccaaccccacagggtgcacggcaaatgtggagacatgtgcaaattactatttactattaactttcttgagaaacggaaatgtagtacttattaaatctgcatttttattttttagttcattgctcctagaatggcttgtaaaatacaaacaatcaaaacaataaaatagttgtggatttacactatacatgacaaaatcattataatacaagctgtcagactaatattctatgtaattgcttcccatgtgatgccagcatgctttcttccgtcagagtgctggagagggagctgttagttatcttggacctggaaagggcccagaaaataggtgatttattcctggttgactttcagagttaacaacacattgaagtgtgaactctgttcgctgtatgtgtgtcttgcatgctactagatgagatggtgacagaagcaagacatagaaaaaataggttatttattaaactcaaactggcttattttaatgcaatagtgaatcataatatttaattaaaaatgaaaaatacaaagacaaaaccagattggacattgagacagcagttgtaagccaagactgttttaggcaaaccaagacatatggttgtcctatttaaatccataaaattaaacttttctgtaatttggatagttctactctttccttttcccattttggtcagcaaagtagccccctattaggtttctgcagtagtctcagatccacttagatctgtgatccccccattcttattctgcacactacgtttacacagccctgctgtgtgaactaatgagacccagttacagtcatgtctatctgctgcttaaaacccagcatggaccacccaggaatgccaccagtggccctctaactattgcgtgcaccaaaatcatcagtgtgtgagggtagttgcaaatttctggttccctcctagagattggtattcagtaagtcttgggaaagccctggtgcatcaaagttgagtctctgtgcatctcattactttgtcacttgccgcccccatccgtccctgtctcatggtccacccagctgttgtaggtccccagtgtcctgtttagtggacctgtctgtctttttccccacattctttcagcagctaaggagctgctgttgtacatctttctgttgaaattaaatttattgctctttgattccatttttctctagctgagcatcttgtgtgatagcagggtctaggtctcagatcatctgtattcttaacctgatgcctgaaacttgtagttactgttgagtgatggtataagattcaagttaacagtctttccattgtttctcttgtcatgaactgaaggttcagtgaattaaagtaggatttgtgtagtcacttcattgtatgtatcaagttctgcctttaaaacttcagttttctccaggatcaatcagtgtggtaatttcaaatttcatactttaaaaattgagctttagaacgggcaaaaatgcctcctaaacatttacaacttctgctgtcttttgaattaaaataaaaactgtgtctccctacagccaaggtagggctcaacaaacgaaagctgaaaggtgctggaagcctcctgcactttgggaatatacagtcaggaacaattgtcaggagttctgtagttgattctgtaggttgggattgccataaggttggttagaaaaaagatgtgcgaaagctttcctgagggtttttgcccttgctttcacatgtcccrtaattgaaattaagaactgctggcaactggttagtgaccagtgttgaaatgggaaaatattactggcttatgcttttgcttatagatattgaaatttaataaaatttaaccatagttacatatgattctatgaaattaggtaggctcttcaagaaaaatgtgagcaatgtaaggcagggtatttttgggaggggggtgctttattgtataggcaagctctcgaacagtgtctgataattagtagtgtctgacaatatttgctgaatgagtgaactcatggtaacataactccagtatggcagattgattcttggtgctttttttccagtggcaaacttttatagaaattggagagtttcgtaaagacttttaaaaagttgtcagaattacctatkatgtcctttcctagataatcaatttggaaacaattgctggtaccttaagcccgatgtatgcctcctattatagtgttgaaaatgttcttttgacaaatgcatcaatgaccaggcacatgagaacagtgcacagctgtagaaaaacaacaatgaaggtcttcgacacaggagagagtctgcactgcatcacagctgatccgaaagttaaattcaatgaaaaggcaaatattttggtcaggagaggaattcttcctagggagtattagcacagtgtatttttagttgtgtggctatttatagctgcccrrtggcttgcgtctgagtctttatttggtttttaggacatgctaaggattgagggtcgtgggccttaattgtatagaagacgcagttgcgtttggttgcctggaggcttctctgtgaagcctggtgggacacctgctggccagtttggcccttcttagtgaaggtgatagagacaagggcagaaggtcattgtatttataggatatttgaagcttatcttgtttactttgttaataatacttgagtcatttttctaaacattctttgcataacagcaaagattaaaaagataagtaatgtaatatattaggccctagttgtcattcacctgttcttgtagagctgatacttttttcttgatcaaattttaggtttaatcatatttagcttagaagagtggtctgtcttaagagtattctgattatttaggaacatctagatgaaacttctttgccttagtccatcgtttctcctttaaattcctaaaggcaggaatgagtgtttcttaaaaccaacatgtataaagcaacattttaggcaaactgggatgaggaaaaacatcttgaagggggcttcataatggtgttggagcctgttaaaaatgtggaatggaaagccgatcatgaaaacagatagtactgacttttggcaaaatgagtctttatgaaaacataccttaatgattatctgacaaatgcaagtgctttttgaggttaacagaattataaacaggagactgcagacactaaggtcactactgagcagcacgataattcgtgtggtgtgttctttttaaagattaacaatcttaagtcttttgtatgttatgttgctaagttatttgggggaaagtgttaaaataagtgctcttactttctttctccactgcttttgcacaaaaactttactgttcaaagaatattgtccattcagtttactttttatttttaagatgaagtatcccccaaactggtcatgccaggaaaaaaaaaaaaaaagtctcttccttccaaatttaagcatgtcagaaaattcttacttcttttgcacctgttaagtgccaggcacttaaaagttcaagggacatagcaggaaacagtactaatgaactgccttcatgaagctcacatgtagaccacaaacacagaaagaaaacacagtgtgtttgatggtgagatggtgtgacgtgctcaggagaaaacaggaggcagggaaggggatagaattggggggaaagggtggggagggaggggggcagttccagccctaccactaactagagtggactagctgggtgacttcatttaactctggaacctgttttctcatgactggattggcaaaaatataatacatgttcaacatacttcatagagttttgtgggtaagaggaatattattagtagtaacaagggccttataattgcacataggataactgtatttgcttactgaatcttcatagtaatgcttcacgctaattgccagtatcacaattcattctctgattaattcagcaaatacttgttgagtgtctgctaggcacgagggatatagctagattttagatacacaaaactctgttctcattctggttgagctatgactgaagagatgtagtgtcttatacctttcaccgttgctgtgtattttatctttaaatgttcagtttggtgacttttgtcaattaactagaaaagtcgatgttttagcgaaaaagtttataattttaatagagcttgtggtagggaactcacagtggttttattttcctattacttactcttggggctatttaaactagtaattttgtttattctataagtttcttaattttaaaagtattcatagagttcttttccttgtaagaatgctactgtatagccctaaaatttataatggttcaggagaactttggatataatacattttgtgataacagtgtggatcaagaagtagaaatgaaatatgccatttgataattgaaagcatatagttagatcgtgaaagccacgcactagaatttgtctaagttgatgaaatgctgactgatgaataaggtgaatctttcttcatttgggccagtagaatggagagatccatataatttggatatttaacaaaaattttcaagtgttaaaaaattatttgaaaaaatgtataatttgcattagccagtacagaattcttaactaacaagcagaaaatccaggagtactgctcattttttaaaagtttttgattaccaggggaaatataatggcaccgaggcacatggcaatgactaattaaaactgagcactagggtctgtggctctcgactgactagtatttgtgatttaatcatactgccctaaagatttgggcgctcacttgggtgggcatagttattacagattggcctacacgttccctttcagagccagaggacatggacgtcttatttagtagaaagtagtaatctgggtcttccaactttgagctctgtgctagttctgtaacctgggccaaagttacctttggttttcccatctgtaaaatggacgtaacagcagggtggtgagaatcaaatgagttaattgatggtaaagacttaacctagtgcctggcatgtagatatactaggtactttattattattatctatcatacaaagctgaaggattgtcagaaaagaatcatgagtgcttcaccatgttggagagcttctgggctggcaaatgtttaactttccctataggtggttaggggtgagcttttgaggtcttcattgtggcaggcgacatctgggacagctcctctcttgtgggtgtaggaagctggagtctgggggctctctctgtttaaagatctttcatgagtagaaacagacgatttgctcggccgtttgtgaggggattttcaggtgggcacgaggacctggctggaaaggaaccaccgtttaattcttcactgcattcgcagacgcattgcatccaccagcaccttggtaaaaagtcttaacgcaacaatccctgatcgtggctgtgcacgtagtcattcaggctttgtcagcctcatgttagaagatgcacatggctgtcattcttcatgtttaaacctgagaaactgaacagtcaaatttggggaatggtccaggactgaggagtgctgaatctaccagcccccagttgaggttcaaataagtgggggtgataatgatactaaccaaaaacagtgtggcattttacacccttttctatgtcagtcccctacttttatttatttctayagtgactttttgaagtaaccaggccagttgcttcttggtggtgtgtgtaatttatttctctttcccttgctcttctgtaaagcgatggcttcccctttgctcttagcagataacctgttgggtgacatctaggcaccaggcagaaatcccatttcccgttaatgtttcaacatgtggatttagcatctactgatgatccttgctgaatcttcagtgggtgttacaattggaagattttctagtcctgtcgttccttctgtggttaccaggtggaactattttgcaaggaagagctgtcaccaactggggcaaatgatgattcctcctaaaaaggcagggccagtcttccttccttccttccttccctccttccttccttccaatcttccttccttccttcctccttccttcctatcttccttccttcctccttccttccttccaatcttccttccttcctccttccttccttccttccaatcttccttccttccttccaatcttccttccttccttccttccaatcttccttccttccttccaatcttccttccttccttccaatcttccttccttccttccttccttccaatcttccttccttccttccaatcttccttcctccttccttcctccttccttccttccttcctgtttagatttaaatcaagtttacatttggtgtaaaatcattgattataagcaaagatttaacatttttgtgtgtgtatcattgtgggtttgtgatttttatttgatgattcaaatacattatttttgtttgagttgtacaatttttagccagtgggaaccctttctcatgggtttctttgttcttttttttttgagacaaggtctgtctctgtcacccaggctggagtgcagtggcttaatcacagctcactgcagcctcgagctcctgggtgcaggtaatcctcctgcctcagtcatttgagtagccgggaccagctaccatgcccagctaatattttaattctttgtagagaagaagycttgctttgttgcccaggctggtcttgaactcctggcctcaagtggtcctcctcttgggcctcccaaagtgctgggattataggcatgagtcacggtgcctagctcctttgttcttttgacatctgcccatactccctcattagtcttttcctgctttttgacacagtaaggtrgccaaggctcaccttatacttcctcatgcagttgatgacagtaattccgtagccattactgagcatgtacatttgtcaggtactggtttgtactttaaaagaattaccacattcagttctcataacaaccgcgagggtagatatttttatttttcccggtaaaatagaggacatcaaagttcagagagctgaagaaggtaacataacttatccaaagctaagctgctagatggcagagcctgcatctgaatccaggacttccaactgcggaacctccaaaccgttgttcctaatcactgccagttttggcagacctcttccttctcttcctccttctccttctcattcccctcctcctcccttcctctcccatttttagtaccaaggatagctcttaaagtatctcttgagtctcttctcagcttcactgctgtcttgcttcaggtgctggtttttcttttagattactgcatcgagtccctgtctcctgcctttcttctcccaatatccacattcctgtcaggaatatcttttaaaaaggaaacaaaacaaaacaccaggcagctgtcacctttgcgtacaggatagagcccatcaccgtttgtgtggcacactggctcctcacacctgtccccacacctgccccagcttctcctgccatgccacagcacacctgcgtgtgcagaacagcatggcaggcacctcttagctggcctcgtgtgctcccgtgccttcgcacaccttgtttcttgcttcttgggatcctcctcccactttgtaaaattttgttttcccgaaattcagcacagatgggcttctgtgaaggtgttgtcctgattctctgtgcagaggtgagctcctgctcgtggtgagtccccttgaagtgtgtgtactttgcacacgtgtccctgggggtgtagttcactgtgcacacacggcctcctccagcagggcagtgacaaagctgggcctgactcatcttcgtaggctgctagttctttcagtcagcagataaggtattgttaaccctcgagacctgtgcgagcacaccagtgtctggctctcctcactggaattgtcgcttagattcttatgtaatctgagtgatgccgtcttgcaggcatggctcagatcctctttaagatgtttcctcaaaactcagcatccgcagttcacatcaccctgtttatgttacgcagtttcatactagtcatgtatttaccccatcagatcaccaagtttgcacttgaggtttctccccagcacaaaggactgtgtacaccccacaggctcccagtgagtcattttggttggtgaagtggtggaggcgcttggtcacctgggagctctgtgtgtgtttctttcagtggtgtctagagagaggataaagacgccaagtcttctactatggcaggtgttttcaaatggcaaaatgctacaccacctggaataaaataacctcatgacactacaagaggagaaacaaggttccaaggcttgggggaagcatgtgccgttgagggcacacacacctagcaggtaagttgtcacacatcagtggcagcacaaggaaggctaggttccaggagtcagcccccagggtgacgtcgaaacaaaaaccagccaccccaggggtgtacatgaagcaccacacaccgatttaggtttggcctgtcctcttttggccacttgccttagaagtgtaaagagttaggtaagattaaaggaagaagtctacagaggcccctgataattgtcagccaagactcatgttgagagtcagggctaaggtcggagttcaacccgatccggttataattatgaaatatatgaatagggtcaatatgagctttcttatcaagtgttggaattctagaaatagtctatgtctagacaaggttgctttaggataaaatgagagaaataattatttcctggataatacgcttaggattttagattgactatatagatagattggaggatggtttatttaaattaatagatctgcaatggattctaaaaagagaaccaatgaaagcccagtatttaaccctttgaagtaaaatgaaagataattgacccttttctctattaatatcctcccatcaaacagtttaaaattttaatttttttagagatgaggtcttgctctgtcacccaggctagagtgcagtgttgtgatcacagtgtcatgatcagagctcactgcagcctcgaactcctgggctcaagggaccctcccacctcatcctctggagtagccgggattacaggtgcatgccaccacccagctaatttttatcagcagtttttaacctatttaagcccaggrtcccttctggaatgtgccaagaaggcatagattctcaacctagaaagttgcacacatgcacccacgatttttcacacagtttttttccatttggtggaaggaccaggggaatcacaaattcatctgaaagttatttgtggatcttttatctcaaaaagttttctggactgtagcccacagttgaaaatgtagtttacatcacaatctacacgtaagcatataagatgaaaagcttcatagaatactaacctgactatgggcaacacacactgttctgttctggctcgttttatgaaatgattttatgacacactaaggggtctccacctgcagttagaaaaatgtagctctcactatgcagagtgggtagactttagaacccttgccttgtcacggccaagctcagtactgggcatctcatgctcggacgtagttcttatgctcattgtccatttgttgccaaggttgattctggctaaatgcataccccaggcagttagaaaagaagaattgcaaatcaacttctgacacattaaaagtgttatgatctggcccacattcatatagattatagagatctcacatgctcagcaaatgtgcctcctttgtggtcacagcacaggtatctaaaaacaccagggtatagcagtgaacaaaacaaacaaaagttccagccttctagtagaggagaggggcatcacatgagatcataaaatatgtcagactgtgataaatcataaggagaaaaaataaagcagagagtggggtatgaagaattgggataaggtttgaaattttagcttggatcgctgggttgttggtgtcactgaaaaagcgacctttcctgagtgaagtgaagaggtcggccggatagataattgcagacaggactttgtaggcagaggccatggaagtgcacagtccctgaatgagacagagcccagtcgtgtctggcgaggagggaaggggacaaggggccagaagggcagtccacacatgtccatgggaccttttggttgtgccaggcagcctgagggtggcagggtagaagcaggggaacagctgtgaggacgctgttgcgacagtcggggccagaacaatggtggtgtggtcctgagggatggcagcgggaagagcgagaaatgcatgaattctggaaagactgaacctgggtgggaaagaaagaagagagcccaggatggccccagcccagaactctgatggggaagactgagatggagtagcttggggcctggggggaacttcaggatctcaacttggggcaggtagaactttgtgaagccttttacacctcattggaaaagtcaagaagataatagaatcattagttaacaatttttgcacatttcctcactaatttgaaagagaaactctaacctgacctggtaagtatagtctggatatttttgtccatcactgtctcatatgatttttaatgtggggctgaattcctggcagttcctttctcagccagccgggggaagtccacagaggtgagagaagccaacttaagagaaaggcaacttgccttcatctttcagtggtcatgcgtggttcagtgttatagtttgtggccttttacaattagaaaaacacaggcttttttcattgtaaaaattgagttttttaattggtgaaatatacgtgacaaagtttgccattttaaccattttctgtgtacagttcactggcattaaatacattcacactgataatcaaccatcaccaccaaacatcgccagaacttaaaaaaaatgaagttttgcattgagacacccttcccaaaagtatttcagaattacccaaatttctggtgaaaagttttacattaataacaatgcgtttttatatacacgagagtaarcatcgaatttaagggtagttgcaaatgttgctctaggggaggacttcccttcgtggggcaaaatatgctgaaattcttgagaaataagtctaagagactcttactagactctgcctttttctggtaactcaccctttagcaaacttaaggtcttctttgtagctttgtaggcctttgaagtcccttcagaacaggtagatcgttgaggactatttgttgccggtttggtgtgtgtggatgctttctaaaagtctcctgataggcaggtctccagggcatgacctgtgctcacagtaccacctgttcatggatctcttctgtctgtttcaatacaatctgtcattggacataagaatattgtttcttgccatgcgcttctcagaaagctctgttgaattaagatgtgtcccaggtcttccatttaactttacagggaattatctgatgattgctgtgttccttgaacccttgctgaagaaattaagtcagcttttgcccatactcacttctcattatgcctgttaagaagaaaaaccacctctttgctgaaatagtgatttaaagacgtggatttgccaagttggattgtatcctttcagcctaaaggtttttctacccgcccccgccccatcttgtcccattgacttaagcttctgtatcgcactagttcaaggctctgcctccttcacttattttccttgcccttcaaaattgtgcttatttctgaatgcaagaarttcaactaggagccttgttcatccactttctttcatttccttttatcttaaaatatacttcttgtccagagtgaggctttaaaragatttttttggttgtatttaaaaaacccacatattttcctagaaaaattcaagtagtaaagaggaagggaaactcggaaaaatctaagactcagtactaaaccaccgtttgatttgattattcttctaggttattatcttactgacatgtaataatggcgaacacaaacacagtcctggcaggtgtcaggcactaaaatgtttcacacccaaacacttccactacttgtcacagcagccctctgagggtcagcactgctattgtccagccgtccagtcacctggatgagcaaaccagagctcacggagcttaaggaacctgcccagagccacacagccccagccacgggatcgagcgccaccctggccagcctgtctgggcaatccctcttggctggcatgcttattcatcttgtcctgtgacctgccttttgtttggttttaaattcaaggatatgctgcaaatcttgcagtatttatgtacagacttgcaatttaaggctgtcagcttgaaggtggagagtgtagacttgaattagactattagactgtgtgagtttgaatccagctcttccagttactgctcccttgacagagtgacttaacctctgtgccccagttcctcctctggaaaaaggggaagacagaaatgatatctttcatagggttttgcaggaattaaatgagttaacagaggtaaagagcttaaaacagtggttgccacataaacactgggccaatgttacccaggttaaatgtcagctacctgcaggggtctctgctcattctgggctggttcatgactgatgggtttgtgagagtatacgtgcttttagagtagtcctagagctagaatcatttgtacacattttactgatttgttatttctttaaaagcctttttcatgggaaggttttattgttggtttggtggctggcagttcttttactaagctttccttcatgctctctattttgtgatattttcagtgagtcacacagcagagacatgttctgtggaacaaacctatccttggattacaacagacagtgacattttctttctagtgtgagctcaagtctgtgagctgtgtgcttctacttgtagtcttttttttttccagtaatggtcattgcggattacttgccattgtgtaggtaggtcagctgcccggggtgccttgcttaaaccttctcagtcctgagttggttgcccttgcatcacagaagaakaagtggatggagttatgtccctgccacggtcccctggcagagccaacggtggtctccagagcgctaccacactcactccctctgtaaggaaagcacaatttaagggtggcagccttgcctttgactgtcccaggaaaggggattttgactgtggattctgtccttaggtaattagattattttgatgagtgctagttctgcacacttgctaaagttttagggactctgccttacttaggagataattctgtcttgagataccccgtttacagaatgctttctaacttagatgtttggtgaataagggcatctgtttgccagcaccagctctcctggctccctgtgctggttttctctgaacacctcacctgactgcaggcagacagctctgagtggctgcctcgtggctagactagtgggatgacttttgccaacacaaacacagttcataaggatctttttttgtctttttttttctttttttttttggagatggagtctcgctctgtcacccaggctggagtgcagtggcgcaatctcggctcactgcaagctccgcctcctgtgttcacgccattctcctgcctcagtctcccaagtagctgggaccacaggcgcccgccactacccccagctaattttttgtatttttagtagagacagggtttcaccgtgttagccaggatggtctcgatctcctgacctcgtgatccgcccgcctcggcctcccaaagtgctggaattacagacgtgagccaccacgcccagccagttcataaggatcgtaagaacaagtttatacttccagcaaaagaaaaacttttgaactgtgactttagtgttaacgtttcgttacgtgtgtaatgcatatgattgttaccaccggttcttgccatccatattcccctcactccccccttctttccctccccattctcctaactactatggtgaagctcctgatagtgtagcatgcaggtgctagcatatgggaagtgagtctccagttggggagcttgttagcaattatattagggttctcttagagggacagaactaataggaaatatatatatataaaaaatatatatataatgtatattgtatatcatgtatatattacatattattatatatattttgtatattatgtataatatrcatatatatcatatatattatattttgtatcatattatgtatattatataatatataaataatatatataggagtttattaagtattaacttacacaatcacaaggtcccgcaatagccagtctgcatgagaagcaagaagccaagagccattctgagtccccaaactgaagaacttggagtccgatgttcaagggcaggaaacatccagcatggagaaagatgtaggctgggaggctaggcctgtctctccttttcacgtttttctgccactttatattcactggcagctgattagattgtgcccaccagatgaagggtagatctgccttccctagcccactgactcaaatgttwatctgttttggccacacccacccagacacacccaagattaatattttgtatccttcattccaatcaagttgacattcgggattaaccatcacatcaataatcaagacagtatagaaagtgagaytagttcattaacggcagttacttatttgatgcagaggatctaaaaatatagaasakttaaaacataaatatcaatgaaaaaatgtgatgctatgagcaaaatgggaagcctatctgtgtcctttctggctatgtgtatggygtatacggtgatgcctaggttaccattctctggggtgtgcacccaggcctgaaaggcactaagtgcaaatggagtcgttaactgtgggcataagttgtctcagggccaggctggtggctggggaggaggtggccccaggacttcttattgaaggttggagtgtcatctgcccctaagtggcttttgtggtcacccagataatagagccagagatgctgtccttggccatgtttgagctccacttccccgcatcagatgttttttgagggccaagagggccagtaaatcatggtctgccttttctcaagaagtagggggaagagactgtaggacaggaaatggaaacctgaatcctaagacatagtccacgtctaatatgatgtctaaggctatgttttcatgagtaaagctgtcacaatattttcctatgttgaagttatcttaacttcatgggattgctccttaaagagagtagattttaaaagctgttcttcttgatgcccttggaagctgtcacatgatccagtttgttgccattgcgcagtactgtatctgtctctttacatgtgcttgatacagagtgacttcctgcttgttgtttgtccttaggcagtttgacttctccactcagcaagcctttaaagcacctgggttatgatgcgcatgkatctggttaagttacaaagacccatgaccatctccttaaaatccagcatccagtacaaagtgtacattccccattcaatcacatagtcatttttataaattcatagccctggtcctaaacaggaagtaaagggaccctgcctcctccccgacccctactccccagaaaccagaaacaaaaagaactgtcagactcctggatatcttgctcttgcgggtactgtgcaggtctctgtgtgtgccaggttctgttgctgttttaacgtcctacgtaaataaacaaaacaccctagaatgaaaagtaacaagtcacctccttccctgtaatcrcccctgatcccctggcatagtctgtaggttttagctttgaaataaatatttgtttgaaaaagagagaggaaagtgctgctgtttcactggagatattttcgttcttttttgagggggtgggatgagttaattctgaccatggcttaagcctataaagtaggctttaagcccatgacgtggccatcagctctgcctggtgacagctcaccctacaactttcttttgtggagagtaatttttacctgagccttataaacataaaacccatagtaaataataaatattgtgatatttattaaaagagtattccctaaaagtaacctctgaaagagctgtaaacatgatctaataaacaatgatctcaaagctccctacctttgggggctgttaagttaatgtgaatgcccactatagctattagtgtgctaggtctacaacattttcacataaaacactttagaacagttaattaatttgcttatacttagtttgtaattcctagactatttcctcatttatagcttcaaagagaaactctrtggcagtaattttccaggtggtccacttggttaagaatatctcttccctttctcaaagaactaaaattagaactgtcatttgacccagcaatccctctactgggtatctacctaaagaaaaagaaatcgttctgtcaaaaagacacctgcacatgtatgtttattgcagcactgttcacaatagcaaaatcatggaatctacttaagtgcctatcaacagtgtactggataaagaaaatgtggtacatatacaccatggaatactatacccccataaaaaagaatgaaattatgttctttgcagcagcayaatgcagctgaaggccattatccaaggtgaattaatgcagaaacagaaaatcaaataccacattttcacttataagtgggaactaaacagtgggtacgcatggatgtaaagataggagcggtaaacactggggactccaaaaaggtgggagggagggaagggatcaaaggttgaaaaaactacctgttgggtaccgtgttcactgtttgagtaatgggttcacgagaagcccaaaccccagctttatatattataccattgtaacaaacttgtacatgtagtccccgaatccaaaatcattaaattatttttaaaaagactacctcttccccttctttgcctygcttttcgtggcaaaaatagaaaaaatcgagtcacrtaatttcttgttcttttggaattaaaaaaaggtcactttacactcaaaaagaatgatccttccaaaggaattaacagctaactaggtattgtttgacatttgcatttggtggcattcttctctaagagatccttgctttgatgcagctggttccagttgcaaaatggtatttcccatgagtgtgaaattatgaagagttgctcctagaaagccattttgttctacaagcatgtttaatcaagaaaataaatatccttttgcaaatttttataagcatgtaagrcatatttcttgcagaagctgagacatatttaatgcagaagctgatttcaaattggcttaatttttaatgcctgcattggaataaacctgtatcccatttcctttccttatgtgggacccaagaccttgtctcaagcacgagaaggtccagtttaagtaaaattagtgtttctcaggagacgagagaggccctgataagatcctcaagttgaaacacgctaaaaccctagcaaattgaattgagacctagatatattattagaaagtacagaccctcaaaggtaaagtagaagatgttgaaggcacagagggagaaagagagatcgcctgagggtctgtaatgacactgactatggatttccacagtaatcatagaagtatgaagatggagctgagaacgtaactgccaacctagaatactttactaatgtaaaatatgattcaagaaacaaaatgaaatggacactttcaaacaagccctgaaatttttaccactggtggactcttgctaaaaagatcatgaaaagatattcttcaaaaagaaagaaattgaactcagaaaggcataagatgattggtgagcaaggaaatgggagatggcaggtatgtctaaaccacattagttgtaygaaacagtaatactgattttgataaaattgggaaacattttattgactaaaatttgtagcaacaagaagaagataggtgatcaggaataatattttatcctgtccttttattatttgggagggaaggaaataactttagattttaatagataagcatgctgatatggtttggctgtgtccccacccaaacctcaacttgaattgtatctcccagaattcctacgtgttgtgrtagggacccagggcaagggggtaattgaatcatggggccggtttttctcatgctgtgttgtgacastgaataagtctcacaagatctgatgggtttatcatgggtttctgcttttgctgcttcctcatttttctgttgctgtcatcacataagaagtgcctttcacctcccaccatgattctgaggcctccctaggcatgtggaactgtaaatccaattaaacctctttttgttctcagtttcaggtatgtctttatcagcaacgtgaaaatgaactaatatacatgctaaagctgtaaggataacaactgaaaattacaaattataggaaggaagggccaaagaactatagaaaaagcaagagtgttagagtgaactccaagtttctcttcaaagaatcagtatgtcagtgtgttcagctctcttattctttgattctccattttaaagtttaacttcctggttctctttgcccccttgcctctagtttcagtaaacaactttcctgccagttctaatcagtagttcacatctgttcccctcatcacctgctgcatcttgagtcacccctggtcacctgctctgccctgagttactcctggtcacctgctccatcttgagtcatccctggtcactggctctgacctgaatcatcctgggtcacctgttctgtaacctcccttcccgccaaactactcatcccgccactcgggctcataccccttctgtctttaaaatagccaattggaattagcttagactgtgcggtccaaccctagccaataggggaatgacacagcagtaggggctccctgcatcaggmataagaaccccttcccctcccttttccaggtttattctcgccattgctccatctgtgagtcacacccttctatagaagtaaaaattgccttgctcagaaaaggaaatttatgttygagtgctgttttcttgcagcaccaagtaacaagcatttgtttctaacgaagagtatagaatgaaatggtcaaaataaatacaggtaaaatgtgtttgtaatccgaataggtaaaaaaggattaaatttcaggtaaagatcagagatgatcagattggataaaacataattttaaggaggaaagaagatgaaggtggtcattgtacagtgataaaatgtatagttctccatgaagataaagtgattttaaacttgtttgccttcggtagcatagtttcaaaatagttaaggcaaagccaacataattttagatctctagtcagtgtcagttgttgaatgacttctctgtaagtaactagtagattgatcagaaattacaaagatcagaagatttgaacagctacagttttaagtggacataaagaaccttacctttaataaggagataaattattttaaaatacaagagacattcaaatttctttacacactaggccagaaagcagttagtatcaacaaaaaacacatatcatactgtgttatctgatcacaattattagattagaaactgaatttctaatcttacgcattttggaaatttgaattcaatataacttgtgggccaacgaagaaaacaaaccggaattaagagtggttgtcaaaattttggagtcggtcaagtacccaagttaaaaatcagacagaagagtgaatamagttaaaggaaaagagatgtttttctttgttttctttaagaatgttaaagagaagaacagaaaataattccaaaacaaggrtacagttaagaggatacaagtgcaaaagtggttatttatttatttttttaaaagtggcagtttatcaagtagaagaaagaagattaaaacattaggaatgaaaagaaggtcacatctacaggaatagcaagtatttttaaaagactacaaacaactgcatgccaacaagtatgagatattatagtaagttctcacttaacgtcatcaataagttcttggaaactgctactttaagcgaaaagacaatgccaagtccttgaataagatcattttcttcagtgtcattttattataacgttgatgagggaaaaaatggttgtattataaataaatttgcttaaagtcacagtttccaaaaacctatcaaagacagtgaggacttactatataatacttagaatataagcagttttctagaaataaccaagtttacccaaattgactaaaaaagagtaggagaccattcaataaatgaatgggttaataatctataccctctcactttgcgttctacccccatactaggcccrgagagttcacggatgtattctaccaaacagtcaagggaatggattctcaaaattttacaccattatttccagagagaagaaaaaaaggaactaaattgatcctctagtttggttttattttcaagctatcatgaaaagcttcaaatttctgtcacaaataagtataacaaataattgtgaacccatcatcagtcgcctagcattaacaattagaatattttgccattagtgtttcatcgataatttctcacagatatctttttttgttcatttgttttaaaatacttgttgtaactgtagctgtgacctccttttcatttctaatgttttgtttgttgtttctggagtatgttaaaacaaatccaagccttgctaaactcatttattagttctcaaaagtttttttaaaaaatttcttaatttcttcctgcatactggatcataccatctgtgaataaagacagttttacttctttccaatcaatgtagattttgtctttttctttaccaagaatctgcagacttgctgagaatgaacatccttacttcattcctgggatctttggggaaacatcttcagtctttcacattaagtacgtattagctgtagggtttttatagatttccttatcaagttgagaatgttcccttttatttctaatttgttgagagttttggtcatgaaatggtgttggattttattaaatgctttgtcaatgactagtgagatggttatgtggtttttctcctgtaatccattaatatggaatattacattaattgattctctgatrtgaaaccaactctgaattcttgggataaactctgcctggtcatgatgcacaatcctatttatctgttgctgaatttggtttgggattttcatgtctgtgtttatgaggaatattgttttgtaggttgttgtggggttttttttttttttttggtaaaaaagattttgctgatttccttttcttctggagtcagttttggtaacttatagtttcctaggaatttttgcattttgtctaaattgcttagtttgttgacatagagttattcagagtatatcgtgtttccttcctttctgccaggtgtaggtagtgatgtctcctctttcatttctgatatgggttatttgtgtcatctctcttctttttttgggtggaagatcattctagcgaagagtttatcagttttgttgaacctttcacataacttattttttggtttgaagtatttttctgttgctgctgctgaattgatttatacttggatctttattgtttcctctcttctgcttgctttgggctgaattcgcccttctgtttcttatttcttcaatagaaagattagattattggttctttcacttcttttatgacataagtgtttaaaactacaattttctctaagcactacattggctacatttcataaattttcatgtgttgctttcattttcattcaattctaaatactttctaattttccctatattttcttttttgactgatggcttcttttttagaagtgtgtttttttaatttttaaattttggagagtttccaaaattgttgatttctaatttaattccattatggccattaaacacaattttctcttgtctttagcttttggtagtttgactattatgtgtccaggtaaggatctttttatatatcttaaatctttttaaaataackgagtcctgttttatggcctacattctggtcttttgtagtaaatgttctgagtgcacttggaaggaccattgttggatggactataaatttcagaatgagttggttgacagtgttcaagtcttctatatcattgccgattttctgttttggtctatcagttattgatagtgggctattgaaatatcaaactataaatgtagaattgtgtatttcatttctgtcagtttttgcctcatgtattttgaggatcatacatacacacattcatagttattacatcttgaaatactgaaatacttgaaatactgaaatacttgaaatactgactcttttaccattatgaaatgtttctctttgtctgtagtaatatttattggctaaaagtcttctttgatacccatacagtcacttcttatggttattgttttcatgtcatattttttcctatccttttactttttaccaagttctgtcttagaatctaaaatgtgtctcttgcagacagcatatggttgctttaaaaaaatctgatctgatcatttctttcttatttttttttttttcgagacggagtcctgctctgtcacccaggctggagtgcagtggtgcaatcttggctcactgcagcctctgcctcctgggttcaagcgattctcctgtctcrgcctcccaagtagctgggactacaggtgcccaccaccatgcccagctaatttttgtgtttttagtagagatggggtttcactgtgttggccaggctggtctcaaactcctgacctcaggtgatccactcgccttggcctcccaaggcgttgagactacaggtgtgagccaccgtgcctggccttgatctagtaatttctgcatttagttaggagtgtttagttatttcacatttaatgtagttattgatatggttggttttagtttgtcagtttgctgtttttctgtttatctcttgtcagtttatttatcctttcctgctgcctcctagttaaatgtgtttgtttttattttttggcctgtaccatattctctgaattttaaaacttaatatttgaattattttcttattgattgctgtagggattataatatgcattttaatttatcgcagcccgcttgggattaataactaccctaattctagtcagtatatcagctttactttgtatctctccatctcctcccccctcctttttggtaatttattcatatttattatacagaatgtgttaaatgtgcatagtgttgtaattaatgctttatacaatgttatgtcatttaaataaagagaagaagcaatattcaaatagtcttctgtatttactcacatatttcccatttccagtgctttaccgttcttcccatggttttgcattactgtctggagtcctttcagcctataggactttatgctttctgtcaggcagctctgttgacaagagattttcatttatttgggaatatctttattttgctttcattttttttcttttttcttttaaaaataatttattcatttattgttatgagatggggtcttgatcttttgcacaggctggagtgcagtggtgtgatcatagctcactgtaacttcaaactcataggttcaagcaatcctcctacctcagcttcccaagtagcttggactacaggtgtgtgccactgaggtgtgtgccactgtgcctagccttgtcttcatttttgaagaatagttttgctaaatatagaattattgattgttttccctttggtgctttgagtatgtcattcattctgctttctgacctccatcatttctgatgaagagtcagccattatatttgtatatatttttattcctgtataaattatgaattattgttttccttgctggttttaagatttttatctttagcttccaccagtttaagtaatatatgtctaagaatctctttgtgtttatattatttgggctttgttgagcttcttggatctatacataattgcatttgattttatttggaatatttttagccattatttcttaaaatgctttttctgttccttctctctcccctctcctctccttagggtattcccattacatgtatgtctgcactgttgctgtttccccactctctgaggtttcgtttttcttacatctttttttctctctgtctcttggataagttctgttgatctctcaaatgttcactgattctttcttctgccatttcaaatctactgttgagtccatcattggatttttaaactctagaattattatttttttattttgatacacgctttttatttgttggcattttctatttgagtcattgtcgtcatgttttcctttagttcattaaacatggttttaaaaaatctttcaagcacaattaaaatagttgatgtgaagtccttttccactaaacccaaattctaggcaaacttagtttccactgactgttctaatttgagtatgactcatgcttttcctggtgttttgttttcaggattttactttaagttttgttgttttatgagtgtgtgtttatgtgtgttttaagtcacttgcctaggtgtaagttgagggatcttgtcctctctacattgaatgggcactgaattttgttctcttcatcactccctgtccccctttcttttagtctgactttctaggggtcactgttttagctgcatagtttatttgtgagccatgttttggtcagggattgtggacaaacatcttgagcccataaggcttccactccctgctsttggattttaatgtggattggaagtgcattcaaattttaggcaggtttcaaggctgccccaaaaagttttggattttagagcattttggattttggattttcagattatgattgttcaacccgtactatatcctcagcaaaaacaagagggctgatgtgtcataggggttcaataaatattgctataatggaagactgcagttagtgaaaccagactctctaggatccatctggttaggaggctccaacacactgaagggtctcagcatygcagcctctcacgtggcagacctacaagctagtgtcaaacctggagcctgcaaatattgactgtgcatctgtgattcgctctagtgggttgggattttttgtaaaatttatatttggccgtgtcctctccaccctaaatagtctcccctagatgagctttagaagaaatacaaaggggcgctttctcacaaaaactgctaagtacccctagtctgtctgacactcatcttctgatattcatgttacggctctaggaacctaagttcccactgacccctaatattccgcattggcattgtgacagttttgctgttaggagcctgcatcgtgaggttggaagaggtcctgcctccataacatcgcccaggatctctgtgcaggagttgcagtttgggtttctgaccagagctgttgtattctggttcctaaatgctttatctgtctgtcattggtctcagtatgtgtgcgcaagtgtatcagtgtgtggtttgagtagtcttttgtgggctgtggaacagctttgctgcatttcactctggagtggattttattcctctggtggaaatactcattcttgttagcagagggcttagtttttcaacactaaggtaccctctctgtgagtgatcatcagactgcagctgtgaaacctgtcatgacctttacaccaagagcttactatgtgcctggtgaattctatacccatttaattttggcatgtcttggtgttttgatttggcttttttttttttttttggttggtacattaggtttaaaagcgaacacgttggcagagttttttggttttgtttttgagacggtttttacacttgttgcccaggctggagtgcagtggtgcagtctcggctcactgcaacctccgcctcccaggttcaaggattctcttgcctcaccctcccaagtagctgggactacaggcatgtaccaccatgcctggctaatcttttgtatttagtagacacagggttgcaccatgttggtcaggctggtctcaaactcctgacctcaggtgatccacacgccttgacctcccaaagtgctaggattacaggcatgagccaccatgcccagccacaaagtttttataatttaagatatgtgaaggcttgcctataacactgtagttcctaactttgccgttttattatgaaaatagaactagatagaaaattcttaacctcaaaaatcctagtttatctatttttagtacctgaacagttcatcttggtctctatccatttcataaagccagacagtaaagcatagtagcagtgattccgattcagaacaggaatttctttatggcttcttcaagctttctgtttaacatttttggtttgtgttgtcaatgggaaataataaatgctttgttatcttttgaggtatctgaagaataatacagttgttatgaatatgtttttgtagtttttccttctcagttgtagcagctgtgtgggaaaagttctgtttatacaatacacatatatagacatgattcaatttgtgatttgtcaagtacacaaargagcaagtggttttatttgtaccagacaccattctgcacttgttagaacaaaacactagcaataggacttgtcggtatcatttctacatggcttaacttttttttcactgcccatttcttagcatgaataagtggcttaacctcttaaatatttaaatcaatttttatttgggtaggccatgtaagaaaaaaagtggatagatatgataatgactactatgacttttagcaaaaggggtatatttaatttttatgcacatagaattcccaatctcatattggggaggaagagaataacaatatgttattcttctacttccttatgtatatactgagagacatttcattgctgtggtatttggtttccttatgggaaggaaaaattgggataatgatgatactgttctgtgcaatttttaatgggatggatagaaattcacgcttgttaataacttaaatcatagcatttctcctttgtttttggttagaacrttaacttacatttaacactggaaaacatgactgtcagaaatttctgtaccttaattctacccacctgcttgaagaataaatggatgtgataatatacaattctgtcattattgaagaaattcagaaatgaagtttagcattcctgtggtgacatgttttattgtgaataggctccgagagcctggtttgaaaccgccaagtaggaacatcgcacaggggacaccttcacatgcgccgcagctgtgcagatttcacctcctgccactgcttgctcattctggttcccgccttctgcctgtctgtacctgggtacacatgtgcgtgtcttttgagcccccattcagttatttccttgtgttcattccttagctacattcccaaaccacagagtaagattgttttaaaaccttttggtgctcatcgttcagttgccctctaaaattcttcccactcacacactctcaacagttaaagaaggtgtttcttcacacctctgtaagccttacagacagaaaayggttcactttggtgaggttaaacgttactcatatttattggccatttgtatttttttttcatgaattgcttactcagaatttggtgggtattctttgtgttggccttactgatttgaaagagcgttttgttaataagccatagcctcttatttacagcttgtcagttttatttcatagcgtttcttttttatatgtacatgtgcacgttattcrrtgtttctgttcagcgttggcgttagggttggcgaggccttccccactgtgtgcctggcaggaactgttgctctgtgctcctcatgggaagctctgcctgtgaggaccccacgctctctgaaaacccagctgcagtgttaggtgctgttggccagaagcacctctccattctaagactgatcccagactaagcgctgcctagcctcctttctgctaggtgcgttaaatgagatatggcttacgtacagtatgtgcacaaatcttaagtgtatagttggtgagcttgacaaatgtgtacacctgtgcaactaccatctccctagaggtacagaacattttcaccacctgacagtttctctgggctcccatcgccccatcaccatggataagcactgttctcatgtccctttccacaggtgggtttgcctcttctaggatttcatacaaacacagtcatatagtatgtacttgttcgtgtctgttttcatttgctgagcatggtgacgtttggattygtctgtgttgtcgtgggatggtgagcagtgttccattgtgtgaacatacccagcatgtttatccactttgctctcagtgggtacctgggctgattccgtttctggttcttatgactaaagtggctatgaacattcttgcgtgggtctttctgtggacaaacacagaaatttcttttggcaaaaatacctaggagtggaattgctgagggaggtgtgtgtttaagaagctccacatggttttccaggggagttgtgccactcttgactctgacaggcatcgcaggagagtccctgttgtcctgcatcctagcagcactgacgtttttctttataattttagccactgtagtaagacttgaatttcggtatggtgagagctgaagaactttgctcttctctgatgagattgtttttgctattctatttatacatttgctgtrtaaatgttaagagtttcatggaaatttgtcagtttccatgaaaaagcctttgggacttgtgattgggattgtattgtatctgggtatcaatttgggaaaaattgacaaacaatattttatttgtcaacttataaatatggcatgtcgcccaatttataggtactctttaatttgtctcagccatgttttgccatttttgttaaacttatttctaatattttggctttttattatatggtaaatggaaattttaaaacctcactttcagtttacaactactatataaacatacatttgatttaaaaaatttgacatcatatctgtgactttactgaattcactttttctggttggttggttgtgtatttattttctgagaatttttaaattgagaatgaacactgatttttttcctttttccctcaccttttttaattatgaaaattttaaacatacaactaagttgaaaagttattcagtgaatgtttataacccactacaaagaatgtcgttttactatgcatccatccatcagtccatcttattttttgaaacattttaaagtaaatggagacatacccctaaaaataccttattcagcaagcatttcattaactggaattccagtttgttcatagtttttttctttttatgtaaaatttcctaacaatgaaatgtgctgatcttaaatactgcaaccagttgcttagctaaacaaatgcatatacctgggtaacctaaaagcttatcaagctggaaagctgtcagtcaccccagaaagttcattcatgtcccttcccagtcagtttccctcccacccttgttgtttgttgttgttgtttatacagtagtttttgttctagaattttcttttaaatggaatcatattacaaagtattttttgataatttataccacagtttggtcagtcacctgttgaaaacgtgtgctgtttctagtttggagccattaggaacagagctcctataaatatttttgtacaagtctttctgctgacatgtgttttcattcctttggggtaattaggttggggattgctgggtcacagggtaggtatgtatttagttttataaaatgctgtcagaccttttgccaaagtggctgtcccattttaaaatcctaccaacgatgtatgaatgtcctagttgcttacctttgrtatttttttcattttggccattctgatgggcatgtagttgtaacttattgtgcttctaatttgcatttccctcatgaacggtgtgatattcatcacttcaaaaaatgtttaattgataagtaaaatattcagcactttttaatgtgctcactacacattcatatactttagggagtatatgttcaaatctttgccaacattttaattatacttggtcttttcattattctagaaactttttataggtcttagggactaggggctattgggatgaaatgaatatattttgcatgtgggaatgacatgaattttgtgggaatgacgtaaattttgcgggaccagaggtagaatgctgtgttctgaatgtttgtgtcctgccaaaattcatatcttgacacttggggattaacgcagtgccatcatggtactgggaggaggttaggccatgagggcgccaccatgggatctgtgcccttaataaagaggcccaagagagcttctttgtcccttccaccacgtgagggcacataaaatgtgccatctgtgaggaatgggccctcgccagacactgaatctgctggcatcttgaccttggaattccctgcctccagaattgtgagcagtaaatttctattgtttatgaattacccagtctgaggtattttgttatagtggtccaaatagaccaagacagaagttggtactgagagtgggtgtttcatagatattatctccccatctatggcttgtttgtacatctttcaacattttttttcttatttattctgtcctcacaatctgtccccgtcaacattgtttttgatgagaagtttaaaatttttttaatgaaatctttttttaaatcaattttctttctttcctggttattgcttttttgtgacctgaggaacttttgccttccccaaagtcacaaggatgacgttggtttgctctaaaaacgtcatcgctttagcttttatacttaggcctgtaatgcatcttgaatgaacttctgtgtatatcgtagtttgtggttcacttggtaacatatggatatccagtatcccagctacatttttccaaaaaacttgaccaaatagatttcttggggatctttgtaatcaaaaatcagttgtgtaatttagaatcataaatgaaaatctatttctggtgctctcttgtttcattgatgtctttgtagatacttacacaggtactgcttttccttgaaatctgttgctttatgatgttatatcttgaaataggttgtaggagccctacttagtacttctttttcaagattgctttggattgcctttcaagtttgttgcctttccttgtaaatgttaaaatcatcttgttggtttccacataaaagcttgccaggattatttttgggaaygtgttgtatctatagatgcatttgggggaaattttatattaatatttgctcttttaatttgtaaacatggactgtctttacattcatttaggcttgtaatttctcagcagtattttattgcatctattgaaatatggcttttctcttctattctcatagtatggtggattatattgattttgtaaaccttgcatttctgagatatgccacatttaatcatgacattttaattggttatatctttgatgtcagattgttaatactttaatatggatttttacatctgtattcttgagggatattggtccataatttactgtttttatctacctctttttttaagattatgttggcttcataaagcaaagtaggaaatagtctctcattttctgaaatgatttctataaaattggtattttytttcctcaaatgtttgatagaattcaccagcaaagccatctggggtttgatgtgtgtgtgtgtagaggtttgggagaaatttgtgtgtgtgtaacattttaatatattataaattaatatgttaatgtatattatatacaattttatatgtgtaaaatagccatatatgtatatattcatacttctgtttcatcttggtgtcagttttggyaagttgtatttatcaaggaacatgtctacttttacgatgatgaatttattggtataatgtttttcataatattttgttattttaatgtctgtaggatctgtagtgttattctcttatatttcgatattggtagtgtgtgttttatttccagactgttttgacttagggctatatcaatttaaataatattccaaagaagcatcttttggctttttaattgttatttgtattgctgttctaatttatttctgttcctaattatttccttatttctactagtttgggtgcagtttatttttctgtttttttcaagtagaaatttagataattatttttttctaaggtgaacatttaaaggcaccatttccctgtgaacattgctttagctggatcccacagtattttctaacattttttgtgtgatttcttctttgactcatggtttatttagaaaaatttactaattgcttatttatttctagatatgatattgttattggtgtctaactcccctgcagtcagagaacataacctgtaagatattccattcactcttttaaaatttttattgagacttattttatggcttaccaagtggtctatcattgtgaatatttcaagtgatttaaagatacattcgacagttggatataacattttgtaaatatcacttagtttaatgtgattaagagtgctgttgaagtctttagtgaattatatatctatcagttactaaaagagggatgttaaaattttcaactgagtttgtggattactttctcccttaagttctgtcagttttctttcatatattttgaagctgttgtattaagtgaatacacgtttagggttgttatagcatcttaataaattgaccttataataaagaaatgtccctatttatgtcttgtaatgctttcttgaagtttacttcggtaaacaccagcattaagaaaaaataaatttagtttcatgagagtctcctgatatctaagagtagttataatatttccatttcttttttgtgggktttttttttttttttttttttttgagacagagtttcgctcttgttgcccaggctggagtgcagtggcacaatcttggctcattgcaacctctgcctcccgggttcaagcaattcccctgcctcagcctcycaggtagctgggattacaggagcccaccatcatgcccagctaattttttgtatttttagtagaggtggggtttcaccatgttggccaggctagtcttggactcctgacctcagatgatctgcccgcctcggcctccgaaagtactgggattacaggcatgagccactgcacctggccttgtggttttaatagactatttttttaaagagtagtttcaaattctcagcaaaattgggctgaaaaaatagagatttccctataccctctcgcacgcccctacacacatacagcctccctcattatcagcattccccaccagagtgatacagctgttacacttgatgcatctacattgacacgtcatcaccccaagtccttagtttacatcagggttcactcttggtgttatgcattctatgggttagacaaatgtataacaacatggatctagtatcatgcagagtagtctcactgccctagaaatcctttgtgctctgcctttatgtttcctcctaccctctcttagcaaccagtgagctttgtactgtctccacagttttgccttttacaatatgttgtatagtttaagtcatatagtatgtagccttttcagatgggcgtcttttacctagcaataatatgtttaaggttcctctgtgtccttttgtggcttgatagttcatttctttttggtgcagaatagtattttattgtctgggtgtaccacaatatacttacctatccatttacctactgaacgacattttgatggcttcacargttttggctattatgagtaatgctactatataaatatttgtttggaaagtttttataagttttcattcatctttcttgggtaaatactrgggatcgtgattgctgaatcatatggtaagagtatgtttcagtttgtaagaaactgccaaactgttgtccgaagtggctgtgccatttgctttccatccaacagggagtgggcctttctattgctccacatcctcaccagcatttgctgtcatgttctggattttggacattccaatagatgtgtagtggtatctcagtgttgtattaattgcatttccctagtgacatattctgtggcacatcttttcatgtttatttgccatcagtatgtcatctttggggagatgtcttttgcccatttttaaatcagtttcacttgttaagttttaagatacctttgttttggataacagccgtttgtcagataagtcctttgcaaatattttcttgcagtttgtggtttgtcttctcattctcttgaaacaccatcttttaaattattatttacatagcattttcttttaccattcttttatttctgacttatctgtgtctttatgtggcatcatttgtagatagcatgtacttgggttctgtgtgtgtgtgtttttaatccattttgatgatttctgccctttaagtggagcactcagtccacttacatttagtataattgttgatagggtttgatttgggtcyagtgttttatttttttctagttctctttttttggtttttgttcctctgttcctcttttccactttctttggctaataatattattgaaatttgacatttcgttataattctctaatggcttttagttatacttgttgatattattatggtttctgtttttgccttttttttagtgatcgttgtagagtartgcttctgagtaatcactcaggctcagcatcgaatgggaacttgtttgaaacatgaattaccaggctgcatcccgggcctcagaaattctgtgggagagacctggcatttcatggtttaaataaaggtatcagatgcttctgaaatgcatgataaaaatctgttgtaccaccttatgtaaagcagaagaatcttgtaacagtataattcaattgagttttcttatttgtgctattgttatatattttctgtctacatatgataaaccccacaatagtgtttttgggattttgcattaaacattattacactgtcttacaaaattaagagaaacaaaaaatgagtatttatatttattcacaatttctggttctcattcttcctgtatatctgaggttccatcrgtaccattttgcttcagcccaaataattttcattagtgtttctcatgacagaaattgttgggagacaattctccataggtcttctgcatttctgcaccttttgcaagcagtgcactggctgtgtttcttctagactactttttcaaggacattcatagagaagacaaaagtcatttctcctgccagaggctggagcaggcatgctcactatccatcataaaagtttgcctttttaagctcagggttctgctcctgtgacatcgtccattgcacgcagaggtgtcatcctctggggactgaggcacagcacaccggagcaggaacatgttggtaccctgggtactgcgcttgctcccagttcacattgatccatgactcaagagtctcttgtcgtctgtgagcgttcttgaaattgtggcaagctcacttgttagcttctgtcctccttgtggtttttctcaaagaggaggatgggagtctcatgggtcaatgggtgagattttaggaaaatccatgggatttgtagctgacatgttgaccaaattgttatcctagtgataaatggtccttcactttgctgcctgctaatgaggggaaattggggagatagttttaaacacagctgcccaaacaatgccctggttattgctaattcttctctgggtgggaggatgtcttcaccctttggtgggcagatggttctgacccttttcaaacagttaaaggagagaaattgataaccaccaggggtggaaagcaggcaaattgtttcakctgaatgttggctggttcttttgggagaagaaggggtgggacttgttaaggcagaaggctaacagctaggttgccacatggttggctcttccagcactggtcctgccaacctcagatgcactggtagatgacagtaaaaggcttaattatttttgtagtggaccctggcagctttagggatgtgcagccctgtcgaagattaccctgacatagacaaacacctgtgggaaaatattagtgtctaataagatcatcaactagtattccagctcttactgccccagatgaggtttccaatgctaatgatgatgacccactggagagtgagaaatttaacccaaacaagttgacgtacattcttgccgtccactccactgctctgggaaattctcccctggcccttccattaaagccacgtgataacccatgagatgttaccatgactgtggggcccgcattggtcaaaatggaggacataatcaatctgtgtaagcgacctaaaattgccttgtccctcttgcatctggcccttgcttacagaagggctgggtatgagtagggtatcattggtaaacaggtgaaaatagctcccgaaataggaaacatacaattttgtcctggtggaaggagagcaacaatgctagtacctagggaagtggggagtgcattacaccttgggaarttctgggacagggaacattaatgatmcttgtcattcagaaccacccctagagccttcctcagggatgaaaaagccctggtgtggttctcccagatttttgcaagggacygaagtgaagctttcrgatctgccattcctccttgccagaccactctggtgacgatttggtgcattcctttgacccatgckgagaattctatcagaagcagcaggggatggtgccagcgcctgcacctgccacacagaacacctgctagcacctctggctgtctgcccacccatactcatggccatggcacagatgagtgccacctgactggtggagcaggcaaacaggatagattggactgaccactgtcaggcagttcttccaaaaacaagggcaagactcagtgattgaactgagctgtagacctttaagagccatagccatctagaaagctctgttraaggcactgtcagcctatgcccctatgatgcagggctcactggtaattgtaagcagcactttccaggaccaatgcaacactgagactgcactctccctctgtgaagggcaggtattatctcccttgtcttcctcctagaagcatagtgacttgcaccttagcagtgatcatcagagaactttgagtatgtaaagaaaaaaactccatcagatcctgtagtcctcatagaacagtggcaaactctccaaaatgagtctacccttgagtatctggggcagccccccagagggatcattgactcaccatgtgtgtgcatcctacaagtagctttcsccactgtgagagccatagacatggtggtaggaaatttgtccatgacgttctctaaagtgatccataaaagcatctggaagcattcattaatggatgataggattgctgtagatttcctcctttgggccaagacacagttcgtgcaattgctaacacatcttgtattatccgtgtcagtggccccaaccaaaaggaaatgtccagaagcttcaggagaaagccacgtggcttgctaaggtggaccctgatgttttatggtattgctttagctggctgggtccaggatgccgggaagcatggttaaggtcaggattttagtttggctcatcatgataattggagtcctgttgatagcagcttttattagatgtgtgagacaaattgagtggatttggttccagcctgtattagattgatcagagtagctaatggagtggatactcagagggaaatttgacagaagccgagacagtataaatacaaggagtgggtcttgttgggagagagttctccagggatcttttgcatttctgtatgtctctggaaaagagagtgagcgcatttgtggtggactgtcttttcagtagtgttgktgtaagcagttagcctcggagacaagatagtgtctccaggccataggtaagtttgtttactgcgctgtaggataaagatgggatgtgggcaggcatgcccattataagcatttgggatccccaagctcagggatcctttcttgtaatgtaacctattgttccagcagtttttacctgactgtctttgtattgccctgtaggaattacaggctcaggtaaccggtacaagcaatgctaataggctgacagctgctcctgctgtgggtaggaaaagcggtagtccccgtttaccctttaagctttcactttccacagtttcagttacccgtgttcaaccatggcccaaaaatattaaatggaaaattttagaaactatttataattttttttttctttgaggcagggtcccactctgtcacccagtctggagtgcagtggtgtgatcacagctcactgtagcctagacctccttggctcaagtaatcctcctacctcagcctcccargtagctgggattacaagtgtactccaccatgcccagctaatttttttatattttgtagagatggggtcttgctatgttgtccaggctggcctcaaactgctaggttctagcaatgctgccacctcagctttccaragtgctgggattacagacgtgagctactgtgcccagccaattcattattttaacttgtgtaccgttctgagcagggtgatgaaattttatgttgtcttgatgtgtcttgcmcaggacgtgaattgttcctttgttcagtgtctccatgccatagatgctaccacctcattagtgacttagtagctggttcagttatcagatggatcagagtgcatatagggctgggttttatccgaggtttcaggcattggcagggggtcctggagtatatcccccactgataaggggtgactgttacactgtttctctgatgaggactcttgtcttctgccagcatccatgaaaatgtcaaaaacaagttatagcttggtagtttgcaagcaggtaaaatctcagacccttcaaatttccttttgtctcttgcgaaaagttcttttagctcttattcttctgaaagtgtctttatttcacttccccctttctttaaactgcttttttgagattaactcacataccagtttacccatttaaattagagaattcagtggctgttagcatatacagttttgtgtccgtcaccacagttgagttttgtacattttcatcacctcaaaaagaaatctagtatccattagctatcatcttcctatttacccctgttaccttccccccaggcctaagcagccactagtctattttctgtctctataaaatggcccattccggttattttttataaatggcatcatgtatgtgactgacttcttttacatagcgtaaggtttttaaagtccatccatgttgtagcttgtatcagtacttcattcctttctgtggctgaataatattctgtagtatagatatgccacattttgttacttactcatcagttaatagacattcggattgtttctactttttgagtattataaacagtgctgctatgaacattcttctgtaagttttggtggggacaggttttctttctgttgggtagatacctaggagtggagttgctgggtcatatggtaactctattcgaggaacaacgagactgttttccaatgtggctgtaccattttacattaccacaagcagtacatgacagttcccattcctttccaccctcaccactacttaccctttttattacagccatcctaccggctgtgaagtgtacccgcattgtggttgtgatgtgcatttccccgatggctaatgatgttgagcgtctttccgtgtgctttactggtcatttgtgtatcttcttcggagaaatgtctattcaggtcctttgccattgttaaactgggttgtctttttattattgaactgtaagactttatatgtttgatataagtcccttatcaaaacaatttttttcctcccattctgtaggttattctctcactttcttggtggtatcctttgaagcacaaaagtttttaattttgatatctagtttaatccactttttttctttcgttgccattgcttctggtgccatatgcaagaaatcactgcctaatttaaagtgacaacaaattacaccgctatattcttttaagaattttataattttaactctttcttgtagatctttgaccaacttaatgtgtggtatgaggtgtaaaggtccaacttgcctctttggcatatggatatccagttgtcccaagattatttgttaaaaagattattcttttccccatggaatggtagtgacagtgttgtccaaaatatttgaccatatataagggagtttatttcagagccttctattccattaggctatatgtctgtagttscaygctgccagtttcatagtatattaattactgtagctttgtattaagttgaaaccagttagtgtgagttcttcaactttttcttctttttgaaaattttttgggctgttctcaattgttcttaccaattccgtgtgaattttgggattagcatgcyagtttctacaaagaaaacaactttaatgttaataagagttacgtcgaatctaaagatcaatttggagagttttatggtattaacagtattaagtccccaaatccatgaacatggaatgtctttccatttaattagatatttatttcaataatgctttatagtttccactttataagttttacacctcttttattcctgttttttttctttttggtgatataactaagactttcttaatttcatatttggtttgatcattgctactgtatagaaatacaatgcagttattccattttaaaaattgatttttgtatgttgctttgtctcttgcaatcttggtgaacttctttgttctaatagtttttaatggactccttaaacttttctgtatagaagagtatgtcatatgcaaatagcaataattgtacttcttcctttccaattcagatacctttgtgtttcttgtctagtcactcagccaaaactagctagaactccaatacaatgttgartagaagtggcaagaacaaacatcttgtttttctgatcttagggggaagcttttagtctttcagtattctgtgtgatgttatttgtgtgtttttcatagattccttttattaagttgaggaagttccctctatttctagtttactgacttcttttttttttttttaatcatgaagaggtgttgaattttctcaggtgttttttctgcatctgttgaaacaatatgtgattttttcccctttattctattgatgtggcatatgaatgttaattgactttcacatattaaaccagccttgcatttttggaataaatccttcttggtcatggtcatttttgtatattgcggaattcaatttgcgaatgttttgttgaggatttttgtgtctatattcataaaagaggtataggtctatagctttcttgtgatgtcttttgttttggtattaggtaaatagtggcctcatataaagtgtggtaaattgttttctaattactggaagagtttatgaagaacaggtatttttaaaaattttggtagaattcaccagtgaagctatctaatcctatgctttttttaagggaggttttgatgatcagtcttatataggcctgtttagattttcttggttcattttgactagtttgtatatttctaggaatttgtttatttcatctgagttgttaaaattattggcatatagttgttcatagtattttaattatttttatttccatatggtttgtagtaatgttccctctttaattcctggtattagaaatgtggatgtttatttttcttaatcaaaataagtaaaagtttgtcaattttgttaatttttttaaaagaaacttttggttgtgttgcttttaaaatattgcttttcagtttattaagttctaaattgtttcttttctcctgcttgccttgggtttagtttccttttttgccagtgtcctaagataaagggttaggttattgatttgaggtctttmttctttttagtgtaggtgttcactggtagaaatttccctcccatcactgcttttgctgtattccataagttttggtatgttgtggtttccaacttctcttgagacattttggggggaggtggcccattgattatttagcatgggttaatttctgcatatttatgaattttcccaacttctttgttattttcagtatcatccccatttggagatagaacttgcatgattgcaatccttttaaatgtactgagcttatcttaagacttagcatatggtctgtgctggcgagtatcctgtgtgtgcttgagaagaatgtatattctgctgttgttgggtgcagagttatctccttgtcagacttgcataatgtttccatcacaataattaatggagcagtttgcctgcccctggatgtcttattgctccttcacagtctgatgctgagatctcaagctatggctgcctgccggttaactcaaagaatggttttcatacctttttttttttcttttttttgagacggagtcttgcactgtcgcccaggctggagtgcagtggctcgatcttggctcaccgcaacctccacctcctggttcaagcaattctcctgcttcagcctcctgagtagctgggactacaggtgtgcaccaccatgcccagctaattttgtgtatttttagtagagacggggtttcaccatgttgtccaggctggtctcaaactcctgacctcgtgatccgcccgccttggcctcccaaagtgctggaattacaggcgtgagccaccgtgcccggcccacatttttttactagctggaaaagatcaaaagaataataatattttatgatgtgtgagttataaaattcaaattttagtgtccatagatagagggtttttttgtttttgtctttgtttaatgccatttcattcattacatattgtgtctcgctacttccttgctayaagaacagggttaagtgattgggagaccagatgacccataagcctaaaacatttactctttggcagtttatgtaaagtttgccaactcctggtctaatgtgtccactatgacttccttatgtatactcagtctggccactgagtatgcctaaaaacggagcacacacctaccgttagctgcggaggctactgttgctcttcctctttgctcaatttcctgaggagggagggacaggatctgcctggggcctggcagcagcaggtccccagggatgctggccctgggggaaccagtggtacatggttaaggagggaggggaaacaaaagcagtgtgctccaccaggctcctgcctcggctctaaggaaacagaggaaagcaaacgggaatactctggtttagtatactgcccgcttctggagtggacattgatttaaggtgggttgggcaggaggcagggggaacattaaacatagctttcctacaagacataatctcattgccccttttcttttaaaactcttaaactatttctgcaaaaacgtcatytatgtggacttttccagaaatatgtcttttacttaaattgaaatacaccctcatacacaactattcacaagtgaaggagcaagggaaaaatcgctttcaagagctttccctgctatgatacggaccgcgtggactcgcccttggtgacctgacgttaattctgactctgtggagatctgtcagacgtgaaatcggccctgtgatgagctaaggtcttgctgttcctaatccttttttctcagaagcaataatatgtatttaattttaggctgttcagtagttaagggcttcagttttctatatctcaagtagatatactggagagttttttatttctttgagagcagagaaaatgatggggatggggtattctcccgttctctacgatcatcagcacttctactcattaggctcgagtatttggggatgttagagaaccaggcatgccacagtttcgcctgacctacctctaactgccagaaatgtactgacgttcttaataattgataggtgcagacctttgcgttcttaattaaagagccactccgtggctgtaggcctctgcccacaagatacagagtcacatgctgcccccaggatgcaagctgatgcttttatagtaactgcagatgtaataacagattctaggtatttcttcagtaacgtatggaggcactgtgtcacataactctcgttcatgtgagtagcggaagatctctcttccatttacgcttcagatgttaaggtagtagaatttgtcacggtgataaaacgtgcttacaaggcagggttgtgtgaattgataaatttgatccaaaatgtattggtcatccatttcaatgattaacagcatctccattgaaagatgttagtgtaaaattaattaaaaccaagatttgaaaataacctgatcgctctagactgttttattacaatcaagtatgatgttctctgttgacctttttagttttaattgagtgcttctgaatgatacttgtgatacagatcatatgtttctttgatggcagtttcacaccacagaaggttctcagcgccttgtagctcattgctgtcaccactccaggctgttgcctgggtgcccgctgctggaaccctgggatgaccaggcacagctgcagatgcctcgagctgctccagccatgagtgtggaaaccaactcggtggtcaggcttcaacacagaaatagcagagagcccctttcagtcacaagaaacataagtcacctaatgcatatccacacgttctcagcataaaaatttagcatcttgtttgacttactttcagggaaattgtccacaacccaaatggcctattactattttattgaggttgcagaagagatcattttatcatctattgtggtttttgctatttttgatgtttcctaatgaaacttgcacttttccccccaaattttgatttttttaaaactatktttttccttttatgaacaggttgaaaggattgttgacaaaaggaaaaataaaaaagggaagacagagtatttggttcggtggaaaggytatgacagcgaggacgacacttgggagccggaacagcacctcgtgaactgtgaggaatacatccaygacttcaacagacgccacacggagaagcagaaggagagcacattgaccagaacaaacaggacctctcccaacaatgctaggaaacaaatctccagatccaccaacagcaacttttctaagacctctcctaaggcactcgtgattgggaaagaccacgaatccaaaaacagccagctgtttgctgccagccagaagttcaggaagaacacagctccatctctctccagccggaagaacatggacctagcgaagtcaggtatcaagatcctcgtgcctaaaagccccgttaagagcaggacygcagtggacggctttcagagcgagagccctgagaaactggaccccgtcgagcagggtcaggaggacacagtggcacccgaagtggcagcggaaaagccggtcggagctttattgggccccggtgcygagagggccaggatggggagcaggcccaggatacacccactagtgcctcaggtgcccggccctgtgactgcagccatggccacaggcttagctgttaacgggaaaggtgagtgtctagggagctgctcaggctccgtggtgatcccagagggctcgggtccttctctagagatcaggccttgagctgggcagagtccggggcttctcacggcatctgctggagccttgcagagatttcgccttctcctttcttcgctggaagcctttgatatttctcttaattcggcaactagttttttctgtgtaattcgccatccacagactgtgctaccacactgacttgctttaaacagtatctccctctaactaggttattaggtgataagtttttacagcaagtttctgaagctgtctacctttcttcacctctgaagtgctgagtcttgtctcgtgttaagcgttttcttctaagtgtggccagcattgatacagaagtgcaggttcttattttgctcatctgtgtgaatacccaggaatgcctttcagtgggagcgttgctaacccagcagagcctttgggagccgggctcgtttctctgttgtgatcggcagtgcaggtgccattgcttcccccgtcagagcccagtctgcctggcaccggtggtgtcctctgttttactctcatccccagccccgctcctgggttctgcagctgccttggttgtgccatgacctgtccatctcccaggacagcacaactgggagttcacatgggtggcttccttctcctcacttgccacactgtgccggccacagttttctcttacgaggcctcatgacttctcacctgctggagctttctaatagggcttcctgcttcctgccttctgacagctcccatcccttttcagtcattcttggacgagggtggtgtccactggtgcccccaccccattgccttcagtagcaggtgtgccctgtgtgtctgcgacctggcgctccgctgccctctggctcgctctctctgtcagcaccagggccrcacgtggtcccttcctctccatctgctcaggggcccccaccacctggccctctcctctctctcccttctgagttgtagtcttaaaattgtctctttagccgggcgtggtggctcatgcctgtagtctcaacactttgggaggccgaggagggcagatcgcttgaggtcaggagttcgagaccagcctggccaacatggtgaaaccccgtctctactaaaaatacaaaaattagccaggcgcggtggcgcgcacctgtaatcccggctgctcaggagggtgaggcacaagaatcgcttgaacccaggaagcagaggttgcagtgagccgagatggtgccattgcactccagccagggtgacagagtgagactccgtctcccaaaaaaaaaaaaaaaagagactccgtctctttacctgtgtgtgtctcctccaacccaagctcagtagaataatagcaaacaaaatacaatggtgttggtttgtttggggagctactttcctctaaagcgaagtgttcactaagacattctaaccgtcctgctttggtgcattcaacaggttttctcctcggcccaggcccttgtgtagcaaaaaagtggaatatgaactgaaatctggggtctccctttgacaggaaattgccatcttgccaatgtttttcagatacacacttgacccaaacggtgccttttccggcttcattggagcttgtgaacttgtttgcaggtttgacttcctatattgtttgacctcatggatacagttttctcttacttagttgtatgtgagggatcagagaagttcagaggtagaagggactcacttaatagcacgctctattttgcagttagggaagtcgagtccagagagaagatgatgttcatggagagaaccgaagccagaaggggaaccagagcgcgtgccttagtgcctccctggcgttcttcccagcattgcttgttgcctcctggacagataagcacctccgtcttcattgatgacttgggggccaggcacggtgctggactgtagtgctaccaaaaaggactgatgagctatagtccgtgggcttggccctgccctgctcctggttttgtatgacctgcaagctcagaatggattttacatttcctgattttggaaaaagaaaaaaatcgggaggaatatttactaacgtgaaaatataagaaattaagatttctgtgttcacacataaagttttcttggaacacagctaaccatccattactatgaatgaatggagctatccattcatttacttccaccaccaatcccggctaatttttgtatttttagtagagacagggtttcaccacgttggccaggctggtctcaaactcctgacctcaagtgatccacctgccttggcctcccaaaatgctggattacaggcgtgagccactgcatctgacctacttggctctttacagagaggatacctgatctctgctcttaggaggccatagatctgtgagcccccttttttgtccacaaaagtcgtgtgtgtgtgtgtgtgtgtgtgtgtatatgtgtatatacacacgtgtatgtgtgtgtatatatacacacgtacgtgtgtatatatacacatatgtatgtgtgtatatgtgtgtatatgtgtatgcatatgtgtatataacttatgtgtatatgtgtatgcatatgtgtatacatgtgtgtatgtttatacatatatgtatgtatgtgtatatatgtatctatatacacatgtacatatgggtatatatgtatctatatgcacacatatatgtacatgtgtgtatatgtatctatatgcatatatatgtgcatgtgtgtatatgtatacacatacatgtacatatgtgtatgtatgtgtatatatgtatacatgagtatatatgtacatatgtgtatatatgtgtatgtatacatatgtgtatgtatatatgcgcatatatacatgtatgtatatatgcgcatatatgcatgtatgtgtatatgcgcatatatgcatgtatgtgtatatgcgcatatatgcatgtatgtgtatatgcgcatatatgcatgtatgtgtatatgcgcatatatgcatgtatgtgtatatatgtgcatatgtacatgtatgtatgtgtatatatgtgcatatgtacatgtatgtatgtgtatatatgtgcatatgtacatgtatgtatgtgtatatatacgtatatatgcatgtatacatatatacgtatatatgtatatatacatgtatacatatatgtgtatatgtgtgtgtgtatatatatacacacattttttgttttgagaacccttgattttcaaaacttcgagccgacaaggttaagagctctagtccttaacccgcacgtccagttttggttggagaccacctccaatgcgatcttgctggttccctctcgtgtgttagttctttcaaaatgaactgcagccctcgccagatccccattgcgctttcaccacatgtgaaacaattcgcaacaagaaccttcattcctttatatttcttatataaggaagataataatagcttccatttaaatgaggatttagtgacttcctttctaaaaaacatccatccacacatgtggcattggttaaaccaaaagggatgtgtaagcatagaatcttaaattattttaccttgttgtgtggagttgggaggttgggttgggaatgacagtatttttccaaggccctcaccatcatttttctctaaagctatgatctctacccctctctcacttctgcctgggcgctggtcagatcagccctgacccctgtatactgctgagaatataatcactagttagaggaaaatagaagctgttagggagcatttttaggacagtggtgaatgacatcccctgcggccttgatctaaatcaggcttgcagattaacgaggaggaagtctttctggaagaaaagcaactgcaaagctggtggagcccctgacagcaggcctcctgtggatttgggagggtcagttctgtcgctgccctggtacctgtgcagagaagagctttgttatactctgctagatcgtaagctccaagaaagcattttgtttttccagactaaatcgaactgtgcccagaatggtgcctgccgtgtagtcggtgctctgcaagtacttgtggatggagtgattccagtagaatgggtgcgcatggaagacaagggttgttgtaaggagtcatttgtggcctgggtcttttgctcagagaggagggaaggagagcaggaggggagaaatgctattgaaataacaacatatatggccagaaacacagacattccagaaagccctcgttcgccctctggcacatgcttcctgaatgaggagaagccgcgctgaagctctgttaggctgttggtccacactcagacactttttaagccattgtttgtttttactttctagactaattttagagctacgtaaagaaactgatttgtttttctaaaactaattgaagtagatactggtggagtcattgggaaacgaaccatcattcaaaacattaatcatatactgaaggaatatttttgccaccaaaaaccacagatatttgaatatctgtgaacccaaagaatgaatgtttctggagtattttcacacacactcacttttatagaataaccatatatgtgtttgctttttaattattttaagtatgacgcaaaggcttaaatgaatatattatttcactcagaaatgtgagaaattctaaaatttaggtgatgcagctagctgtcttctttctctctatcaatgtttaatggtaatttcttgctcttttaattccctaatgaattaatcctacaaaagaagtaattgcttttaaaaactggattatcgtaactttgtcctttcatggattcaaacatataattcatcatcattccrtaagtatgaaatttcagaaaatgctattagcaaacttaaaacaaataggtgtaaaccttatcagtgttgtgacatagggttggcttttggatttcatattgaagccaacagacctagtaggaaaatgactgargaaatattaataccttagcacaccttgcatttcatgagcatttcaaccaaaggaaactcctaagagaaagtgttgaggaaaacctggctgcttctgaggagctggagtgtgatttcctctcagtaagaatatgagtagatgatccatctccctttcctctgtgattatcagggaagtataagaggcacagctgccctctaggaagaagccccagggctttctagggccttttatgatttagtctcagaaattagaacttaaccccagggaagattaacaaatcaggagaccaggccaggtgtggtggctcacacttgtaatcccagcgctttgggaagctgaagctggaggatagcttgaggccaggagtttgagaccagcctgggcaacatagtaaggaccccatcttcataaaaataaaaactattttcctaggttttgaaggtttttgttttgtttttttttttttttttaaattatccaggcatgaggccaaggcgggcggatcatgaggtcaggagatcaagaccatcctggctaacagtgaaaccctgtctctactaaaaatacaaaaaaaattagccaggcgtggtggcaggtgcctgtagtcccagctactcgggaggctgaggcaggagaaaggcgtgaacccaggaggcaagaggttgctgtgagccgagatcacgccactgcactccagcctgggcaattgagcaagactgcgtctccaccaaaaaaaaaatccaggcatggtgactacatgccccctgtagtcccagctacttaagaggctgaggtgggaggattgcttgagcccagtaaatcaaggctacagtgagctatggttgcaccactacactccagcctattctacagagcaagaccctgtctcaaaaagaaaaaaaacgaaaaggcagcagtgcccagaccagcgcccagaggtagcagctattccctggggccacagcaggaaacctccacttgaaaagagaagacatttgaagtcaagttacagcaaacaggcaattagaagtgtgtttgagggtttgatcaagaaagatttcagtttgaaaccccacaaatgattgacatgtcctgtatagtgggtccatgctagaggcttccacatgtgttatcttgcttattcttttcaagagcaaacccacttacacaaggaaagggtccagaagctagaaatcaaacgagaggggagtagtcctttgagacatgyagatgcacagcctccctcctttctaagcatttaataggtatcctcaggcagaatgatgtgatgcccagcagcaggtgggttcctcagttcctcagagtgagcatagtggtccgcaaacctgcgtgtgcttaaggattctagtgcagagtttcaggcatagagcccgtagagaagatgctcttgtccagctggagccagtctgcttactcccaggaatctttaaaaacatgcacaccataatgattttattttaaaacttaataaatctgcattattttccaatgattgatgtcgaaccaaggccctttccaagggagtgcttgcgtttgccacttggaagagccaaggacttttgaacatggattcattgcttggagccctctcttgtgtaaagcatgctcgtaatgtatcacttactgttaccactttggatttcttcaaagtagagcaaaacttaggtgtacttagaaatctgagtacagccctagcctttttgatttttctcattttctcacacctggttttgacaacagtttttagtctagagcctttccaaatcattcaatgtagttttctttgaaacatcagctccccttttgtaatcatcccctgttgtatgtaaaaatgaattaaatataacaagttcagctagccaaaaawgtgtaagaggaaggagagcgttccctctatcctcttaggtttgtggctggggcctgtgaattacagtggtgaaagacatattaacaggagaaaaggacatatacatttaattggtgttttaaattttatgttcccaagaggtctccacacaaaagaggaaaccccaaagaagtggttaggtttgagagctcatataccattttaacaaaggatgataaattgcggagaagttcctagacaaaagaaagtggggtttctaggcttcttgggggtggtaaaatgtggggaggtggatatacggggaaacaaatggaagacaaaggctgtttagtaaggtctgttgatgccgtctcggcccagtttcatctctctggtaatgaattgttttccttttcctggtacgggaaagtgggaatacctttacagacaggaatttaagccctttcaggcagcaatagagagttctttctgcatctgttgcttctcagttgcctttagctaaaaataatccgtattcaaaagtggcatattttagaattgcatattctgattcccgtcagaagtttagggaacgaaccctgccagctcttcagcagccatatcccgaggggaagagtcacgtgtgagctgtgtggagtcccgtgaccatctcactctggatagggaaccaaggtttctcaaggagtgttttccttcttattctgagagtccctgctgcagactttgagagttttttccctgcaaatgaagtttattgatgtcacagctccagaaatgttaacacacatcctgttgtaaacagaatgtgtaaatgtcatacatttttgcacaagtaatttagaagtactttgagcaaaatatgagttcactgttacctccccctctgaataccaaattccccagagagaacatcagtagtttgatgtgtgtcatttctatctttttctatgaatttatattcttttatatgagatcatactacgtaatttgttcttagcatttgctctttttatttaacatcatgtcttggagaactctctattttaagactcaaattatttctttttatgttttaaactttatataaatatgatttcaaacttacaagttgcaagaccagtacaagaaatacccatatagtatcccttacccagattcaccaattgtttacattttgcctcatttactttccctctcctctttctcccccatatatgtttatacacacatacacatatgcatatacatttttttcctattcgaggatacattttacactatttgagagttagtcggcaacttgctattgtaaacgataaaacacaaggcctgtaattgatttaaaattttaatagatgttgccaaattgctctctaaaaaagctgaaaagattgtgagtacatatttacctattcttaaccaacattttaatctatttttcagtgtctggcagatgagaaattgctatctcattgttttaattttaaaacaggaaaactgtttttgcaagttaattgactgtttgcattcattcttctgttaattccgtatacgtgtgtrtrtrtatatatatatatatatatatatatatatatatatatatatatatcttgcctgtttttcttttgggtggtttaacttccaaaatgtgaacatttcgtgaatgtacctgtctttgcccagggactacactgatcttctctgcatgtttgagctgtggcgtgcatgcttgtaaagagagtgcctaaaaagaggtccatgattcagggtcctccccaccccactcaggggtgaggtaggactatctaggccctgccttaagggactagaaaacttccaattaatgtgcattaattttatggttcctgctcagttttgaatataccaaagtatatttcattactttgggcttatatgaagtacaatttaaaagaaatttagatttcttaggtcagatgacataaaaggaatatttctaactatagttcttgctccttttgaactttaactgatacaaggacaaagggggggaaatcacattttcagattaaatttgctcttgtcgctgcatgtgctactaggaattaagccctgttacaaatcctccttgtctcctctattcccgttagcattgtttttgctgcagtcaggtactggccttctggaatattcctccagtggcatgctgtaccttaaggttgggagcagctatatatacacagggtacaggctctctagcctcttccgagcatgctattctggtgcctttgttctgtcttaagttcctccaacattcatcttcctctttcagagaatccttgttttacagaagaggccgcttgtgaaagagagtgatttgatcaaatcactagcagaattggygggaaactagactctacgttagaacctactcctgacttccatttagttctttgtactgtgtcacactgataagtgaattttttrtaagcgtaattgattttattaagtacacagtattactcaagactttcgcttctgtgtcaagtgagtgaaactgaacccacagtggcttaaacatacaagcaaatgaaatggcatctgttggctcatgaaactgaaatccaggcacagctggatctgtggcctgaagttaccatcattctcataccccaccccacccccagcctccactttttcagtcaggccatccttcccgcatggaagcaaggtgcccccgcagctctgggctgccaccctgacctctcagctgaccagacagaaaaggggcttctcttcctcctacgtttcaaggggtgaggtcaacttcatctaaactctgtaacctagaaggaaggggatgagaggataccccaggggaaagccagggctagtaacaatagaaatggcaatagaggccgggtgcagtggctcacacctgtaatcccaacactttgggaggccaaggtgagtggatcaactgaagtctggagttcgagaccggcctaaccaacatggaaaaaccctgtctctactaaaaaaaaaaaaatacaaaattagccgggcgtggtggcgcatgcctgtaaacccagctactcgggaggccaaggcaggagaatcgcttgaacccgggaggcagaggttgcagtgagccaagatcgcaccattgcactccagtctgggcaacgagtgaagctccatctcaaaaaaaaaaaaaaaaagacagtaggtactgagcaagcctggacaatcatactttgaattaatgtcatgttccagcgtttgggtggccctctgaaacagtacacagtcatcctcccaatgcagctgtgcccaagatgctgctcaccaggagactgagctgtgcccagctctgtacttcctctttttgaataggtgttcttcctccttttctagtcctatctttgggagctaggcactgcatttatctcctttttaatttgatatctcaccttttacacatcagtcacattaattacacaaatggactgtttatgaggatccbccagggagtccgattctccaaggctcttttgccttgggtgcagaaggtttaactaacgtggcttgagtacttagattggatggatgggagccgattccctagaacagtctgaaaaaataaaatcggatgtttttaaaatatccagggaaagatccagagtagatggacaaattcacttaaactttaaatggtaaaatggaagtrttgtgcagatatttcagtggtctttagaatctcctacattgcctagtccaattgtttacacacattaggggcttcattaacatttgcgtgtacatgagtgagttgttggaggaatttttatcccttctgcttccgttattagtgtttgtcttttaaaaagaagagtaaaaggaatggtttgttagggtagtcgggacaaattaccaaggcaccaagaggcactcctacactcctgccgccctaagcacttaggggacgtcctccaaatcagacgagtcagcaggcctgtgctcctgcgccatgtccctgctgtacgtgcacatgtccttttaagtgaagtcaatatattcctcttcacagctgcatcccagtgctcaagggaacttcttgagagtaagaaccaagacatttcgtcctagtttttctactacctgccacatggtaggcggccactaaactgtggagtggatgaaagcattttcttccgtgatggttcatcttaaatgtcttttgataattagcattttattgaaaattatattgttttatctgagcaaaatctacttaaagggttcattgaacttcaacaacaagtgaaataataaaagaacccacacgatgcacacggtggcttgccagggcttgggtgccggagggaggagacagcttctgtgtcctttctcaccagcagtctctggccccagtggagccccaggctcacctcccctctcccgctttgtgtgctcggcccctgcagctggagtctgctttacttgattcatgttacttggtgtccacacagttgctggctcctgagtatcttccgtggcttctgagttcctgaaacacattttcctcaggttttgaggcatctttttaaagcttgcttttagtttcggattcactctatgtcccatgccatacacccatcagccgtctgcctgggagagtttctggaagctccatgcctcttcataggcacgttgccatgtaccacatggcaggcaggtgtgactggagcttggcattgcagagcccctgacttccaggagctcagagcctggcagaatggatattcaagaaagagccctcgtttctgatgatagggtctgtttgaaaagcattgtggttgacagagccatgccacgctgtctgcagaccagaggccgggcccctcgcagtgttgaaagttcagccctgccrttgtgggtagtgctccctaaggcaagggcagatgccagactattgttaagaagattatactaaactgatccttgtacagccctgcttctcgtggagtgatgacaccgaatgaatgagataaactgtctctttttaaaaagtaattaccccgatatagtgaatacccatctcctccagtgatatggacctgatgtaattggctctcagtctaggatcataaatggcatctgccaaggcatccttaataggaaatattaagaaaacattttaaagcttatctccaaagtgtttgttactgcaggttattttctggacgatgtatttgctcttccgagcaagtggatttgatgctcaattcttccattcactgcgcccctccctgccctggcttttgggaagataacatttcacaatcaggtttatttatgataacatctggtctgtcctccctactttattatttaagacttgtttgtgcttaaaaagaactttttttaatgggaacacactaggttctcaaatatactttcagcccagttacctcagtcatagtcatctctcatttctgtctgcagtttaagttcttatttatgtctgtgcagtaaggagagggagcgtgttgccaggagaaaagctgtaaacggctttgggcctcatcgtacagctacaggttgtacttaggacccgtgttagccacttagactacagctgtgcactgtgtccccctcatccccaccccgacctccagctgagaaataattatcacagagtccatgcactgaaatggaggtgtttaatcacaagaacacctccgcagtgcctgtgtgatcggccgtccctatgtgagctgctgatctcagagacagcattaggatggcgaccactgccccagacggcccagtgctctacccctagcgtgatctgaactgctgaagtcagagaagtccacgttggataaacaaagccagcccagtagtaacctggctgtcacagtgaccgtgtgtccgtcttactgaacctgggtttacgtgactaggatgctgacacaagtgagtttgcgcatggcttgctgttctcttcaaccctctccagcctgaataggaatgttaaacccactcaggrattctcgttggtctaaaggactgtgttcattggtctttgacactccgtcaaccaacttagcggggttgacctgagccttcggacacgatgtgcctgtgggtgcctgcctctcctcccacgagacagacctgaactgtctcctcagctgctcagctgattgtgagaaatgtattctgtgacaaaggcaggccacatttcagcgtcttttctgaagtggcatgcttaattccgcaggggcagtggggggatatttagaagcagtcggtgggagaggatgaactgctgagtttgaagtagtgaaaggggaaatcagtcataaaattcatgtttgagaattacaccagtgaagccgttgactgcctgggtcagagccgaagggccatgtttagtggctgggagccactcgcccccagcactggctttctgcatgctgcacgcctcttatgtcaagtctttgcctccatttttgtaggacctcttctttttcattttttttagttttatttgttcccctttttattttatttatttttcatttgtttaaatgtatggggtacaagtgcacatttgtaacatgcatagattgcatagggatcaagtcagggcttttaggggatccctcacccacataaacatacatttcaccaattgagtaatttcttacataggacctttctactgtcaacagtaattgtgggaattgtttctacagtgatttaagccttgaaagaagtaacttcctcctagtaaaattgtaaaatcaaatggtaagatgacgtggtctctaaggaggagtgtctacagctttaattactacactgctaatggtgagagggttgtacattttatctggtaagagaaagtctgcctctcccatgggcggatgatatgacttttattgaatggaaaaccggatggagattatttttcatcttgctaatgtagttttaaattatgtattccatgttcacattgtaattgtagcattttcttgcatgacactttcagcaaagtttggtagctgtttcccatgcttggcattacctctaaaggtgaagtaacataagaattgtataggaataccatgagagcataacgtgagcattatcagctaggtgagtgcggaagatcacactgtttaattgctggattgccagcttctgacccttctctgggagtgcggctgcctctgtacctgcttcatgacagtacaagcgtgaaggccacaggagaaaaagaacaggaccacacagcccagaccagccttggaaggcatgacattgcgtacagagtgtatcggttgcttctgatttccgtgatttgaaccactcttttattatggacttcaaagggaaagtaagcataagtttaacttctgtgctttggtttttcagataaaccttatctgatgggacaaaaattctaaaactatggcagctatcaaaattgtcacagctttataacagcaaaccaagaggaagagtggtgtaaaaatagactcagtctgagttttggtttggtttcgttttatctgggggagaaggaggttgccctagtaaaattacttgcaaagtcttccacrtgccattttttctgttaatatgttctcagtgagtggtctaaactaaatgtattgtgttctattaatcactgtttacagaaatttgccatttaggaatgtatattgtgcagtctaatgtgtgcatttcccagttttcacaaggggttttctcatgtgcatgtaataagcagttccacactgggttttcttgattatasagtctgtgtaacgctgtgacagcctggggtggcacctcgccacaatcttcagagttgcacattactgtgtaacattagaaactgctgctactctgagctcaagtgagtcaggggtgcaccccaagagctggatcactgtagggccagtgggttaccaggttgtcctcctacagaaaggggagatggggggaaaacagaccaccctgctgcagttttagcctgcatttccatgagttatggaaggattggragaaaagctgactgtcagagttttgctctaatacagcttttttgtgggtttttgtgtgttttctttttttctgagacagggtccggctccgtctcatccaggctggagtacagtggctggtgccatctcagctcactgccgtctccccctcccaggctcaggtgatccacctcagctttccaagtagccgggactgcaggcgtgcaccaccacgcctcactaatttttgtattttttgtagggatggggtttcaccatctctacaaaagatggggttttgcccaggctagtcttgaactcctgagctcaagcaatcttccagcatcagcctcccaaagtgcctgtaataggcatgagccaccatgtccagcctctaatacggtttttaagtattctcggatgctcaaaactgatcgcaaaaccggatttcaaaattactatatagtttttgttactgtatttataaaacttagcacattgtggcttttaggttgctgttatggtgaggtcagcttcctgtcttggattttgagtagcttttgccctcctctagaacatggtgtgttcagttagatgctctcccttgatcctttgctcttcagcatgtcctaaacgtctctgttagacagaaccatcagttccacagtttggccccccttgagctccgtgttctctaccaccccacttggtgcccataaggaaagagacacataaaagcccctccttgctgtcagggggctcatgggctgtcaytcctcaatgtacttggtgtggacccctgaaatgccaaacacatggaaaattctagcaccctagttagaggaacactgcatgacaagttcttgtttctcctggcagctttgtaagtacccaggcattcccttgcagagatgggtgtggtccctcagtgattgtcctgggagccattcagaaccatagctatgggtgatccttggcagcacctggttaacctgatgggaaagggtccggaaccgggcaggccatccaggccgtgtagatgatcagagggtgcgagcacaggatttaggcattggtgtttcatagatggataggtggtatgtccttgggccctagtttgagaaacactgatctgggctgaagctggaggtttgttttagaaatttgcttaaggaagtatctaatttcactgtagtttgctcagcctttagctttgcagattaagctagctacttattgaaaatacctcctcagaaccctctcctcctgccccccacaggcaacctatatccttggctctccaagcttccagggtctgttttttaagcataaatgcttctacttttaaatagtacttacaagatcatacgtcacctctgagcttacgtctctctttccccattttctcccctccatcctgcagaaatggaactttaaattctgatccaggagaaccagtagcccacaggcagtcctttgacctcctgacctgctatgcatcctctgccctgcagcttctcacatccccaggtggaaatgctgtgccccttcatccataccgtggcacttcctcactggaggtcacctctcctgtgcatgktcacattctgcctgtctgttgagaggctccgttcttcgctgcgttctgcttacctggttaagccacaaaaggttctatgcttagactagacgtgggatttaaaagtttccatgttcgtgtacaggagtgtacaaaatatgcatgagcaagtggtcacagtcatagacacaccgtgccttggggggccccaggtcataagatggtgttctctgtatttcacctgacrcctttggttttgttgctctgtgagaatgagggcagtcttttaaaggaactcatccagaaagaaaggagaagcaagtgtgttggagagaagatacattcatcatgtcattactaagccctgtattaaacttattgtaaacactagggtaattactgactccctccatgtgaggaatcagggaagggctgctgtgtccaggctttccggcgtccgtaagtgctacctccagctattcagtagctccagccgaaagccatgccctcccctttcctgcatccttattatcagctctgctgctcaccattgccaccaccttgtccaagcaattgacatyagtctttattgcctttttccaatccatttctcacacaccaggaggattttttatagatgtaagtcatatattactgccctgcttaagggtgtgtcttcgctttctggtgtacttgagataaaattcatacttttttttgtttgtttttgagacggagtctccctctgttgcccaagctggagtgcagtagcaccatctcagcttgctacaagctcygcctcccgtcttcatgccattctcctgcctcagcctcccgatttagctgggactacaggctcccaccaccacgcctggctatttttttttttttatttttagtagagatggggtttcaccgtgttagccaggatgatctcgatctcctgatcttgtgatctgccttctcggcctcccaaagtgctgggattacaggcatgagccaccgcacctggccaaatttcatacttcttactgtggcctacaggaccctttggggctggcctttcattgcttactgggcttccaatatgctaggctccctccactttctggaattggccaatttctttcctcctgttttgcacatgtattcatatatatacatatacacacatacctttttttttttaatctggttgacctcttatccttctggcctcagcacagacggcacttcctgggagaagactccccgattttccccctccatctaaaacrtagcgctcagccacagttctagttgcatgcttaatgtgttggtttctttacctaagctaagctgcgggaagttaggcagcacatatgtttatttactcagtctcacggcattagcacctggaacaacaccaggcagtgctcacttgctcaggtttgttaaacagtgactctgatttttgtgtctttgtcttgttgccagattaagttcttgtctgtggttttatggccagaagaggcacacataaatgaatgagtactctgcctttaactcccttcataytttctgctcttttccttctgtccaatttattaagcacactgcatactatgtgccatgtcatgaggttcactgggtgacccccatgggaccatgtgactgatttgtcctctgaaagccagtgcttgctgggctggggagaagccagttgcacaaaaggttataacataaggcaacaggtaagtgctctcagctgagcaacttaagagactgtgttcaaaggctcaaggagcgagcatgtctggttgaggtctgcagaaactatgaagagggaaaaggtgtctccgtgggcctggaaggattagtcgggtttttataaagcagcagtgttggaagcgatggtttggatagaaggcatgaagtgggtagtggagtgtttctgatggtttatacacctctagaccttacctgagaaaggattttttttttttttcccccaagacggagtctctctctgtcgcccaggctggagtgcagtggcacgacctcggctcactgcaagctccacctcccaggttcacgccattctcctgcctcagcctcccgagtagctgggactacaggcgcctgccaccacgcccggctaatcttttttttgtattttttagtagagacggggtttcaccgtggtctcgatctcttgacctcgtgatccacccgccttggcctcccaaagtgctgggattacaggcgtgagccactgcgcccagccgaaaaaggatttttaaggcagttgacagtttggaaatacagggatatagtgttctgtttttaaatccaagcgaagatgtcatgacaaactgaaatgaaaacatattaaagccagggttatggttagtccagtccagggtatgcatgccgtggcattggtgactgcaggtgggctgcagatttggctttcagctgtctggtggcatgtgataagagtgtgctgatgagtcagatccacagtgctctcacacatacatgcgcacagtagttgctccgtagaagtataactgtgcacggtaatgagacttgaaaaacagttttgccctaggtcattaggaaagtttttcctggtttagtgaacaaaatgtgtccgcaccactttcttcacaattgatacagtattcatggtactgtttgctaaagggggtccttggtttgtagccagaggcacaaaccacttttggtattggttctagggatagctaaaagcctcagagttcatgtcatagagcatggtgtttctaacccccgccccttagctttaaataaaatattagaaaagaatctataattttcaaaattatttaactttaaataacttcctaggttagttttaaacctttaggggttacaggacatccactttcaaatttcaccttccagtaagtaaaaacatgacttacaaatacagaatccattcatgtcaagtattcatttaactcagcgaaggaatcaaaaagatagtaaagttgagtcaaagaaaatgcaggagaccatgtgtaggcactgaaacaacgctgggatagtttcagagaaagagacaaaaccggttaacggcctgcagggcagccatactaacctttgctgttgtcttttctcctgagcaggtgtcatttcaatctctaagcaatgccattgatttatatcactctcagttttctaaaattgacatccatatggagctgtaaaatactctaaacagcgctaaacagtcaaatgaaggtacatggccataaagaacgagatgatccctggtgggagtggctcccagtgccccagcatgatgttgaaaagatacgtggycctttcacctgtttccaagttgggaattttttttttcctgaccattaggaaaaatgttgacgttggttttggtgaatctgatttgacccattcttcctgggagtaataggataacacggccgcttctcatttgtgtagacaaccccagctcatcatcatctgcacgtggcctggagggtcactgttccctgcagtggctccttgggagaggagtagcaccctgttcatcaaaagcaggtagcaaggcgcacttacagttgctgactggcaggggcggaacgccgtagggctttgtagccagggtaagaagtttgggtttttttcagatggtgaagggattgaagtggaaacatgatgtgtgctgattgacatttgacatttgattgtcttctcagtccattttcagatatttgtgagagaatatctgaaactacgtaatttacaaagaaaaggaatttttctttcttgaagtgatagatgctgaggagtccaggatcaaggggccccctctggtggagcctctttgctggtgaggactctgctgagttcccaggcatcacatggcgagggggcagagcctgcttatgtgccagctcagctcactctccccctcttcttatgaagccaccagtcgcactcccgtgataacccattcatgagggcagagcccccatgacccaattgcctcttaaaggcccctcgtctcaatactgccacactgggggttacatttcaggatgtgtcttggaagggataaatgttcaaaccatagcagctgctgactgctctgaggagagtgacttgccggtgaggtggactagcagaagtcatcagagcctttctcagagtccaggccaggctgttaatgctggtggcttgcagatgtagaccagcattactaaactcttaaaagtttgtttccctgggatcaaagctaacttggcagagaccttattgtgtcttcagaattttcttcccagtgctcgaaattcgagccaaggaacgaaaatctcttgaatgagggtaattttattaacactcttccttattatttaattaaaatttttttatttcaggggtggttttaagtgccatcttttaaagcattacatcggtaatttgctaatctgagcttctctcctctccacagcatgaggccctgatacatttagggcctctgttaaaaagcaaaaagtgtgtggcagtggcaatagaatcaccaaagctaaaatcatagagaatggtggctcgtagtgttttaaaactgtttgaaaagtgattataggattggggaaaagttgatacttccatctttaagcagataacagaaagcctggttgcatgactggcaaacaattttagatttaaaaacaacagcccttggctttaaaatacttccaccttcttccggccttccagggaactctctatacttccttactaggagggttatactggacaaaagaggaccgtctagtctagggatcagcacgcttttcctttaaagagccatttagtagatattttacactttgaggccagacggtctctactactacttaactccactattgtagcctgaaagcagccaaagacaacaggtaaacaaatgaacgtggcttacaaaactttattcacaaaaacaggaagcagcccagatttggccaggagcccttgttggcggagcccgggtctagcctgttggccacccaagttcttacctgtctcctcctaaccttctcaccttkggaaacataatttattaccatgtatgcctgagtcatagaggactgactgctctctctatggtttctcctctcctaggagtggactattgttgatttttacttggttcttgctaggctgggataggggctgcagtggagggtgggaacagggtaatctttggttgttctggtcttaggccctgtgtgtctcacctgtgggggtgaagtgtttcatgatttttttcttctgctcaaggagtgaaagagttcttttttttttttttttccacactctccttcctttggcactagtagatcaacagggtttgctgcccttcccccagaggccagagagagggcagggcaggagagtacggctccgtgcttttctcatgggggtggcacgtcctctcctctgtgcctgaaagcctgcttcacctccacactttctcattagcgaactgctacgctgtcgtgccagtccacacgcagcctcttgcaggtctttagaagctcagctgagtttcttactattatctgtctcttgtgttctgccgcagttgagacagtccacrtggccccagctttccttgcagcggctcatctttcctcarattgcaggctgtgtggctgccttgcaacctcagccatcctgcaagttcaagaacagttgtaattgatagtttatccagctgtaaccagcgttttagctgtgcacgggcctattcttcattctgagctattaagctggttttcatttgactttggtttgcatagaacacagggtttgcagaatgggtttgtgactggggtgggttgtgacatggtttcttagaacggggcccacacatggcccacrcatagaggtgtttcagtacagcagtaacagcccggcacggtaccacagtgttcacagttgtgggaacagggtgaagagtagactgtcctccagctgggagagtaggcagggatgagtcggtgcaagtggatgagtccaggacagagctggcttctgagcctaggaggtcgggcatgtatccttgcctttattcactgtgccctgcctgtggtttgcatgtgagaacacacatctctgtcttgtgtgctggggctggcccaacctcgtagatcatgtttaactctgtgttgttaggcataaccacagtctastttaatgacagcagatgccccactgtttagtcacactgcaaagagcatcctttcgatcacctcccagtggaaatccatgatgawgaataaattcctagattcggatttgtcaaagatttgttttgttttgtttaatatttttgatacaagttgtcaaaccatcttccaaaacacattttaccactctgctctctagccagtgaacacattttgcttggccctgatattagggttgttttgggtgtttgataaacttatgtgttttgacattagaattgtaaaccaaaaatagcattctaagccctgcaacttggaatgtgaactgcctcttggccaaggggaccctaaagaaacctacataactagttcaggccataatgtgggggatgggggcagacacacctcattatacccttaccgctttggagtttagacacaactgactagcattaacattaaaagagagatcctaatactgacagaacagactctgtagcaaccagataccaacttccaacctgagtcaggtagagcatcacatgacagataataggtgccctgaaggaagccaaagtattttatcccaaaatataacttgacatattctgcaatgcccctgtaaagctctcttgtgggggaaattttcattctgtagagaatctccttcccttaccaggtcttttccagagaggctgacaccttttcagctctgataagagacagtcaccctatatatgaagcctgctacctggagacttcgtctgtacggcaagaagcttggcttccacacctccatatctaaactcaagcatttctttattctggattcacctcttcagatagggcttactcttgcaaccaattgccagttaggaaatctttggatccacccatgacctggaagcctccccaccccgccaccccatcctgccttcctaggccaaaccaatgtataccttacatgtattgatttatgtctttgcccataacttctgtattcctaaaatgtctaaagccaaactgtaacccagccaccttggcacatgttctcaggatttcctgaggctatgtcagggccatgatccttaacctcggtaaaatacacctctaaatggattgagacttgtctcagatactttctagtctacagaatgattaacttgattgctttaaaccttcaggtttggagtggccatcttttttacaaactgcatacctctagccttctcttaggagatgacgctacatgccaaatgttttaaatttcaaggatagtctttatataaaatctatgtacttgtggataatttcctcaaagaactcatgagatgagaaactctcgactgaagagaactaaaaataaagactgagtgaatgtcacaaccactgagaacaggttttgaaaagttcactgtgaggtaaatgaagaccctgttctcatggtctgaaaattaattgaaaggccaacagaatgacgcctggaagggtgaccagatgtatcggggggggcgggcagtttctgtcccctggcctgcctccccctctttcagtgatgctgaccattcacctttatctgagtggttcattccagccaagcagctgagcctgtgaggacagaggcatctctccattctctcaacagcctgtttctctctaaaataaaatcacatatttccattttcttatgatgcttcctaattccaaggaggtgtagtgtgtagtgatcccctcatgctgggcaggtaccccggatggaggcctggccacgtgcacggcccactgccacacctccacytctgacacgtgggccctgagggtgatggggagtccagagcaccctgcccaccagagaacttcagctttgatccgttttgtttttgaggttccaagtaagatttttctttaggaaggaaaaaatagctctgtatacaggggcaatgctaggaaaactgttgcttttctgtactttgtggattctactgagtttgtaacctgccctgtcttatcaaatcrtttgctttcatggttattccttccttatggttttggggtggttgagtgtctatgtgtgtgttggcttgttttcttttaaagaacctcatggagaaatttatcttagatcttagaagtaccagattgtcttttgaagtcataggtttgtttttgtcttagaatcttcgttttaatggcgtttccatccttgctttggcctctagaaacaccagaactgagtatgtggcttgcttttaggagctaaccacaagactgactgtttctgtgtggtggttctgctgctagcttcttgttggggtttgttagactttgagtagctttgcctttgtagttttaagggaggtctataatgtatactaatactaatacattgtaaccaagcatagagcctcattatgatagcagttgagacacagttaaaattaatgtaaatgttactcaagtttaaactgtttctctaatctccgatttacagatgaagtggggggcagaagtcagaagttaattgtcctttggtgtagtctgctgttagaatactgagaaattgatagaaatggcagcactgaggaaggattaaaagtatagatggcaagttttcattcttaggctgttgctgttggcattgcagggagaaggttgaagtagacatgatgatgaatatcagcaaacaccttgaacccctccttactctgggtaattatagatgtacttccaaatgaggtgtctgaagttctgccctctgtgaggtgaactaggggtggaaaattagcacttgaacgtcttagcttagaacacattggatgcaataactataggttgtgagctaattttctttgaagtagatgtttgcctgtagctactattcatgtatctacccaagatagtatcttcctttaatatctaggttttgaaattaacggccacacactgttaatgaaatagagaaattagattgtaattgatcagttgtcttatgaaaacaakagttgcaaaagccagttggttctgagagtcaggataaacatgaagaaaagtattgatcattcaatcccatgtcaaagtagaatcatttctgcaggaaatgtagtttttgaagatgtgatcaataataagatcccactgctggaaattataccatgtcgatagctatggttatttttgtattttcatttgtcctttttaattgttgttgttattgttaattctgccttattctctgcactgaaaagaaaggttgggtgatgttctgccccccccctttttttttggcactttgaggtgacattataacataaaggttgttgcttttttctctccaatatttgatgtattttcaaaggctttaataaggaaataactaaatttaaagtaccacctgtcttctttaatttgctttaggaatttatccctatatgcttagttagaatgataggattgatattgcgtagtaatttctgatgtttttgttttagtttgtcaaaagtaaaactaaatagcatgaatttgcgtctgtaattaaagattgaccacgcttgaataaagttttccattaacttcttcaaataatggagttcacttttaaggatttccctttcctcagtgtttttaactttgattctaaaatgctggttgtagggattgctttgaaactgctttatctctgtgtatgttttgaagaactgagtaaggatgaacacttcgatttcctttgggttactaaagactttgctgcttttctgatttaggagtccaaatccccttaaggattaatgctctcagaggagctcagcacaactcaaaatgaagattaaaattgacacaggattcttctacacatagtaatctataagtatgggcctttakactacagaaccttcagacgtgggcaaagacacttgactgtctctagttgaaacctgcgctaactgtatagttttgcatagtttatggtgatattgctaattagagtgttttgttccagaagaccggaacaaaacaagttcaagttcttttcgttatcctactgtcagtcattcagcaaaatgagtgtctttaagagtgaggctcctgcacagaaccagaggcacaagcttgatgaggcctggatcctacactgggtacatgtgtggcctgtgtgtatacattaaaactgcaaggctggctggcatacagcagttccaggatataaaaaaaaaaagaagtaagagtttgtgaaggtattgtctctaagctaagatagcctcaaaattggctagagattcttgcacaatttatcattgataatacaggttaaataaccctgtctgaaatgcttgggaccagaagtgtttcagatttcacatttgtcagattttggaatatttgcattatacttaccagttgagcatctcaaatcagaaatccacgatgagcatttccgttgagtgttacattggtgaaaagtttcagcttttggagcattattcaaaaaaattcttcgagttttcaggttagagttactaacctctctccaacatgtaaaggattttacctccttgtatccctgtttctccatcccaggagaactaaagtgaagacatttaacaaggaaatagaagtaatcacagtccatgattttaatcttttccaatagttttattataattactaattaaacacattctagataatttaggaaactattaaatatagcttcaaaaaattaaaatgaccacatgatgcagcggktctwtttctaggtatatacccaaagaattgaaagccgggtggtgaagaaatctttgtacccctatgttaacatcatcaatagctaaaaggtggaagcaacccaagtgtgtctatcatcagctgaataaataracaaaatgtggcctatccrcagaatggaatatgaatcagccttaaaaagcatggagattctcacacatgctgcaatatggatgaaccttgcggacatggtgctcggtgacataaggccatctaaaaaggataaataactaaacagttccacttacaagaggtacctagagtaaacgagagtggtgctttaccagggcttggggcgtgggagtggaaagttggtatttagttggagtctggggagacgaaaagttctggagatgcatggtggtgatggttgcacaatagcgtgaatgtgcttaatgccatcaaactgcacacttaaaagtggtaaattgtatgctctgtgccttgtgtcacaataaaaaatgctctagattccatttgctaatatgtaggacttgtgaaaaatatgcatatacaatatatattatggcaccactggactataattatttaaagacaaagtccataggtgtccccagtgagacgggactctgctgccaagcctccggcgggtcatgcaaacagtggagggcgccgttcctggaacagcagtgccccagcagctttaagcagtaggagggataaaagcaggagtggttaaagtgaaatggcagagctcattaatcaaattcgttcagttttattgattgattgagatggagtctcgctctgtcgccsaggctggagtgtactggtgtkatctcggctcactgcaacctctgcctcccaggttcaagtgattctcctgcctccgcctctgraggtgggattacagtcacgcgccaccacatgcagctaatttttgcatttttagcagagacgggatttcatcatgttggccagactggtctcagactcctgacctcaagtgatccacccatctcggcctcctaaagtgctgggattagaggcgtcagccacygcacccagccaaatttgttcagttttaaattgcatgtgtgtgtttgtatgtatgtgtggcttctcagtaactgcaccagcatgatacatctgtgtgtgtgtgtgtgtgtgtgtatgtgtggcttcttagtaattccatcagcatgatacatccctgagccattcctctggaaaatggtggtcttcaatccagctgtaggcatggcaagaagggaaggtcagtttcagcttcagggtaggtgggtagatagataaataggacagagatgggtgtgttttaagcacagggcaggaagcaccaacataggtgcctagtgcgtcacttyccacattttccctccacaggacatggaatactagtgactaagcctcgttttctctctctgcccaagtaactgaagctcaccacatggtggcccagcaccggccttctccccatttgtgaaaaccagtccacttgcccttcccgtaggttgatgccagaagtaacaagaggactctagttcgaagtccttaacatttaataaacaagaagacatattggggagttacaacagctcttgatctttttatgttttattttttctccttaagctggctcggaacacattttctgagccctggaagatctttctcagcccccacttcctaggctcagctttttgttattcctcgtaggtgggtgagctgtagacttccttgtgccctttccaatgcctccacctttgtgtcatatgctttttaacttggtatttaacccttcaaaggctggctgcagtctgtttgtttccatcctggcttttcatggtaaaccttcatcatcccctgagtatgtagtgtatttggccacctccgtttctttgctaatggcatagtacctcgacatgccatatactttttttttttaaccaattacattcaaaaaatacttattgagcaccaactgcatgcaaarcacttgagagtyagttagaatcccaactccataaagtcttcaccagcattccctgggaatattcctaacctccgtggagaggtttcttgtcagtaaccactcatttttccaccacttttcttttgctagttcgtttttcacgtargtaccgttcctgcctctgtggtggcagctgggtatgacggaggctgcatttgtgcagcctcatgggcctgaatttggtatgagcttagcacccctcacctgctcagtgaccttgggcaggcgaggtggttaggcatcctggacctgaagttttcatcttcaggggattatggcttgggggttgggtgagacacctggtactgcccggccagcagtgatgggtccacagatgctggttgccgacccgttgcctcagtatctgtgtctctgacctcctgtgaccaccttgctctgaaaagccagtatgatcgttcactgggatttcccctcttgcttttggtgaagaataaaacaaagttggaaagagttatcaatgcatgggcaatgaatcctgaggacagatgattaattaatatgtgaacatttttatcttcctgaatgatattgttaaaaaagtataaatacaagcagtacaagaaccagcagttaaagtgtgtctacattggagaccatttcactgtgaatgggtgagcgtgtttccttgggtgcagctttaacgagcagcacggcgtaatccaggtggtgcccaccagtacgtgcttcagagctccctgctggttgccagatcctgagccgcctgcttccccttttatcattgttatttatctgtgttaattacctggacttgaacagtccttcctctgatttatgggaattgttactgctgctgcaatctcagtgttctgatctgaaccatttcctttgagttaccctgaatatcctgttttgggcctcgaatgtgcaacatcagcaatggacaccaaacacaccgacctgcagcgggtgcccagcctcggggtgcgtctgatcacacaccacggggcctgagctccacccagagtcctcgggtgcctgcaagtgtggcccagggagcttttttccccccttttattttttactatttttactcaacacttatgtacatattacaattattatgtacaatataatttgatayatatgtgcaatatgtaatgaccaaatccatcacttcagacatttatcatttctttattttggtaacatttaaaatctgctctatttgaaaatatacaataaattattgctaattttagtcacyctgcagtgccatacgacactcagaacttattcctccrgtctagctttaattttatatctgttaactgacctttgactcttctccccccacccactacttcccagcctctagtaaccactgttttactccctgtgaggtcaactttttagcttccacatgtgagtgagatcatgcagtatttgtcttaatgtgcctggcttcgttcacttagcatgatgtcctccaggttcacccatgttgacccaaataacaggatttcactctttttttaaggctgaataatactccattgtgtgtatataccaacattttctttatccattcatttgttgatgggcacttaggttggtttcatatcttggctattgtgaatactgctgcaataaacatgggagtgcagatgcctctttgacgtgctgatttcattttctttggataaatatctagtcaagtgattgccggatcatatggtagatttatttttgaagaaacctgcatactcttttccataatgactgtactaatttacattcctactgacagtggataagaaagagttcctcttctaacccggtgaaaccccgtctctactaaaaaatatttwaaaaaaattagccaggcatggtggcgggcgcctgtagtcccagctactcgggaggctgaagcaggagaatggcgtgaacccgggaggcggagcttgcagtgagccgaggtcgcgccactgcactccagcctgggtgacagagtgagactccgtctcaaaaaaaaaaaaaaatcaaaaaaaaaaaagagttcccctttctccaaggagcattttttagaagtcccctggcaatcccgttgcagagtcagggtgagaacccctgctgtcatgtggcacattgcacttgccacatctaatacaacattattgtgtgtctctaggttcacaattctgtggtttaatcaggctagtcttatttagtcttaggaaaatataattaattatctagagttgatttaaaggtacattatctcattaattggtacttttatctcaaaatagttatttttctttttaaagtcccctcactgcttttggcacttaattttttggrgttgattctctgtgaaaagttagctatgaaacagaatcattttaattgcaggaaccttagcttacgttcttctctctgttgattttcagaatgctccctaagcctgtggagtctcaggtatttaatgttctcatttcgtggtttgccgttcacctgcccttctttatatttctagcattctcaagttatttagcagtttccaggaattatttgtatgtttcatggactaaaatgycttttacacctcctctgttctcaggtttttcttttgcttttaaagtgagtttaaagcattctctgaatgtggtctttggtagtaagcatttccatcctcactccccattgagctcttgctggttggtttttatgacatcttgaagcatatcattaagttggatggttttatttttagggccaggtctaaaacatggctgtgaataaattttttctcgagtcaaccaaaaaatgaacgacttcgatactgagcagttgaaagaaaacttacagtgagttctgctataatgtgatatatgtgatcctaaaaatcgccacactgcaaaatcatgcaataaaagctacagggcttatgggggaaatgagattagaggtacagcccacaaagactttgtcatggacacattaacctaatagaaacagtagcacaatttcaagtgtcaaatagttaagaaaagcaagtactacaataaatacgatacattatcttgaaaaaggacagcagaaatttgcctgtagaagtgggccttggaagggttgcagcatgtggctactgcgaagcaatagaaggactgcaatctgaaaccatgcagaaagttgtaatacctgatgtgggtgggtggctgtttgagtgtgttttgtgtgtgttttgtgtattcctgcctagccagtttcagctgggtgcggttgtgcattcactgactttctccagacaattgtgcataaatgtgtgacattcgcagtatactcagatcgttcctaatgtgtcacttgtttttacaacaaaacatgattgaagtcctgatggtatatcaatgtctttcttagagatggctaagaatgagcacatttagtgaactatatattgaatggtttataccagcttgtatagatttgttatgcgtctgtcctcattacaggagctattcttttttctttttttttttttttttttttgagacagaatctcactctgtcgcccaggctggagtgcagtggcacgatctcggctcactgcaagctccgcctcccaggttcactcatgccattctcctgcctcagcctcccgagtagctgggactacaggcacccgccaccacactcggctaatttttttgtatttttagtagaggcggggtttcaccgtgtcagccaggatggtctcgatctcctgccctcgtgatccgcccacctcggcctcctaaagtgctgggaacagggtgaagagtagactgtcctccagctgggagagtaggcatggatgagtaggtgagagtggacgagtccaggacagagccagcttctgagcctaggaggtcgggcgcatatccttgcttttgttcactgtgccctgcctgtggtttgcatgtgagaacacacatctctgtgaataagaatagcccggcaggagctattcttagactgattctagctcatcgttttcccctgtactagaactatgcgcttcatgtagatttataacatacaactagttaggtagrtttcattcattattcttttcaaaaatgtcttagcctatctccctgctaaatcctaaccaccgagttttttattggaagtctactagaattagactagcctttaactcggagacccctatggatagagaactggaagtgaaggagttagagcaaagacacttttacaattatttgtaaaggatttatttaacacattatgaagaaaagaggtattgatgtttaaagcctgcatttacttccatgttcatatgaaacatggttcttcaagaaaatttgcagattatgtaatctgaataaaattataaggttttgtataggtgaataggattacgttcaatatatgtaaataacaatattttgaaatattaaactccataaacggagagctattaattctgtagatgctatagtccttgctttttaacttcagaccaaagacaacagtggtcattaatatccaagatggttaaaaacagtttttgaactctttttgcagttgagacccttctgccttgaaaacwttaaaacttgctaactcttgattagacaattctaaactaaaatataatcggagaaataccagttaatctttagctagtgaagaataatatcccagacatttttgtctggattttggatgctgtagtgtagtttcaagtggtttcttgattatgtcaaatatattgtaaaaattcacaaaatagcaagaggataagaattattctatgtctctctcaccaataaagagccaatattaacatttctataatttacattcctaataaactcacatggaaacatygttgatatctgtctgtccacataccccttctgttatctttcatttttatttttttcatgtatgattttggggatgggcagtggaaggacacaagcgtgggaatcagatctgcaggtaccacacacctttcaggtgtgctgcagggatttgaatccgattttatgcttaggagctcagcatgtgtaaggtgtgatgtaaatggcagctgctgtgatgcacttattgacccgtatttttaaaaatcttcagaagcataatagctatataatatcgtgtcaggtgcacgtgtgccataattaatttcactgtttccttactactaggcatgaagtttagggcttttggcaatttttccattttaaaagtaaagctgtttgaataccttttgtgtgtaaaaacatatcctcatgtactttctgttttaggagtaaaattctaaaggtagaattataagggcaggggttgattgccacatcttacaaaattgctttctaggaatgtaccgatttatgtatatgtgcccttcgctagccctaaattgccatattttaaagttttctaatctgaaggtagaaagaacgtctttttttttttttaactcagatcaattttttatgttttagtgttttcattccatcattcgaatttactgtacgtgtgtgtgtgtgtgtgtgtgtgtgtgtgtgtgtcttttgagacggagtctcactctgttgcccaagctggagtgcagkggtgtgatctcagctcactgctgcctcagcctcctgagtagctgggactacaggcatgcgccrccacacccgactaatttttgcatttttagtagaaacagggtttcaccatgttgaccaggctagtctcaaactcctgacctgaagtaatccacctgccttggcctcctacagtggtgggattgattccaggcgtgagccaacacacccaacattgtgtgtgtgtttttacatctgttttatgctttgcagttattagtgttttaatgataatactagcttttcgtctgtgaaattttcaatttttatgtactagaattttttaagctttttcctttcctttttatgtttaagctcttctccgtctagaaactttacatgttctattatgctttttattaaacaagacttttgctatttattgaatgttttataccagcttattgattcatgatgcatgtatcctcatcatagaagctgttcttaaactgattctagctcatcattttcctctagctcatcattttcccctgtgctagaactgtgcttttcgtgtagatttgtaatatacaactagttaggcatatttcactcattattcttttcaaaaaaattttagcttgtcttcctgctaaatcttcaccaccraggttttaattggaagtctactagaattcaaattgggaaagagaaatcactttacagtgcttggtgttctccagaatggtggcatcccaccacaccttttgtgtgtgtatgtgtgtgtgtgtgaggggggctgtctttttatgtttcttagtacaatttgatgttttctgtttgtttattccattttttttaagttgttyattcctaattttagttcaggattatggatgttttctttttaatgtgtgtttattttctaaatagttcccagaatctagaaatgctgttgtttagtatgtttttgcaattcttccccttgaactaagctatctcacaacatcttaaaatgccctttgacataaaccgtcaaccattagtaaagtaagattgtgcttccatgagtaatgggtaaaattggtacgtggttttgctctgtggcatttgtgtctagtcagggttaagttatctttgcaaaacagattggatgaattttctttcttttctctgtggtcagaggctatttgttactacacagctgttccttaacctgcatagcctataaactgttttaagaggtaatttgttaatgattttattttttctctttccttgcttttttttctgtttctgctacatcaaagatcagtctcgagaatttatatttttccaaagaatagccatttttttaagatactttaatatatttgtatagtatgtacaaagcggtttttattcatttttgttaagttggtatgaaagcaggggagacattgtttcagtgatgaggccaagcagttactactgtctacatttagttaattacacttaatatgcagttggtgcaggttcatttttacccatatatttactggtctgatactctttattcctttgaatgtattcaggcttctgtctggtattattttccttctgcctgaagaacattttttaacattccttacagtgcaggcctgctggtacaaactctctcagcttttatctagaaatgtgtttgtttctcctctgtttttgaaggacatttatgctgcatttgtgctgtgtatataggttggcttttttttttctcttcatacacttcaaaggtgccattccattttcttctgtcttgtatactttctgaatgtaagtattgagttgatctgttattctatctgtaatctttttgttctcatgttatcagcagatgataataggccttagtttggggtttgtgtgtatttatcatagttagtattttttaagcttcttgaatctgtcagcttctggtttttatcaaatatggaaaactttccactattatttctgcaaatgttttacttacacacacacacacacacacacacacacacacacacacacatacatacacaccccttctctgagactcaarttacacatatgctagactgcttaatattgtcctacagggcactcaggttcatcgttttttctgtttcttctcctgtctattgctgtgccttcaggttctctgatctttttagtatctaattggttcaacayattcaatgaaatttttattcctagtctttcatttctgcattatgttcatgtttttctttaaatscttgagcacattgagattataacagttttgaagatgttcttttctcgtaataccatcatctctcatttttagtctttattaactgattttatcttagtcactggtcctattttcccacttytttgcttatctagtaatggttggttgatgaacattgtgatttacattttggggtgctggattttgttgtatgcttttttaaagtgttagatttgttctggcaggaaattgttagttgtatatcagtttgatcctttcacagcttactttgaagctttgttagtgaaattttaagtattctttattctagagctagattagttccactgctgatatgtgcctgatctggggtctctctactgaatgcctcatgtatttgatgaratctctgctctggctgattaggacttccggccctaggcagacttgagattattcagtttataggtctctggtaattgttctttcctcaaaagttgttcactgcccagccttgtggaatttctccctgtgcatgctcagattggttcagcaaagactcaaagggatcccctaggctctctggaactttttatctatgtagcttcctccttttccatatcatgtctcacaaattacagcctcctgggcctcccccaagtcatctgttctaagacagcatttttgccagctatgtctgggtttcccatccctgcacctgcactgtggcagctgctttcggtggaaaggcgggtggactgttaggctcaccatgtttgtctcctttcactctgggaacattgccctrcacagcctgtggtccagtgcctgcaaacagttgttatgtstattttattcagtttcctagctatcagtggcaggtgaagaagtacagacgctgttctctttaggtgggaagagggtgtcacaagtcattgttagagacttgcagtttttgaagcagtgatatttaacagatttgccatatgtatttgaggatatcctttttgctcttgaacatattaaaagaaaatcaattactgcaagagatactaaaataggtttctttcctagtcgaatgttatgttaataaatcctaggaaagccttggtactctgaatccaaatccgtaaggaactctcagttcacagaggcaacttgtactcccgtgtcaacgatgagagtcatcgttccaggggagtcgcactaatttccacagtttggggtgaggggggcggtttttttctgaatctcagtgtttaccatttgtttagtcattagcagctacttctgctctgaagtgtggagcttaccatccctggcttgggttgaggtaatgagctgtgtgacacttggccagtcacttagctacttgtctctaaattgagggatctggactaaagagacttgaagaccctttccatgagtttactgagtaaacatgtactgagtgttgtatgcactggggatgggtggataagacaggcgaggaccctgctcttacacagcttggtggagtacatcgatgatactgtaaataaaaatacaatgagaaagaaataactttcatgggtgctttgaaggaaataaaccagggtgatatgaagtgctratggsagggaccagcattaggatgggaggcccaagaaggcttgtctgagatgctgaaatttgagctgccgtccagatgagcagaagaaactggccwtttgaattccaggtcataggcgttctaggcagagggaagaacacatgcaaaggtcctgagatgggcacaaccctgggtggcatgagaaccccgggtgatgtgagaacactgtggcatgattgtcttgagtagggggcatatgtgatgatcagggtcctagtcagtgctggcagcctgtgactccaagactcgatcctgctgtgaatacttctctacctaaatagtgcaaagttcagtgtcacatgccctactcagatgagtaacagggagtgccaggaattacattggggtggggtgtggtcgctgaagctccaacaagatcacagagtctgaaatgagcagggacctcactggcacgaggagccaacacagttttaactcaggagtctgaaggccaagttcagtagtcttggtcagcgtgagccaaaatgaatccatttttaaattagcagaaccacggatagttcgtaggcactatcgcctcaaagaaaatgctgaagctgtttctgagactcacgtataaaggctgcatgggctccatggcctagaaatgttgcttcggtggaaggaagccaccaggaaaactgctgggagagtttaaggaatgtgtgacctttacgtagagaaaggaaagacccagtgaaagcaagagcattccagaggtggggagagtggacctgaagccagccagctttgccctggtgggaggcaggtttcttagccatttgggctgccttaacaaaataccatcaactgggtggcttgtaaatacacaacagaattattgtgttaattatcctcataattctggagagaaccctaagatcagggtgccagcaggttcagggtctgctgagggctcacttcctggttcacaaatagcacctttctgcwgcatcatcacagggcagaagagccagggggtgtcggccctcatttataagggcactcatcccattcatgagggccccacccccatgacctaatcaccccccaaaggccccacctcctcagaccatcaccttgtgggtgaggatttccccacgggaatttgggtgagacacaggcatttgggccatggcaccaggccttccctgtgttgccaggatgctgctttttgtgcttggatatagcagcaattgaaaaatccagctcaggttgaggaactcttaaagacccaggagctctcacttggcattaccagctgctggcatgtgtagtctgaaggaacccccttcttagaatgcccagagtctccacgtctgtctcctgtcccaacatgccagcaccgtgtcacgtagcctctgcctgcatctgcacagcattgtttctggtgtggtctctttttaggcagggaaatcgttgctgtcggctgtcacctaagtggcaatgtcatctcacctgcacttttaacaactgctgtgcccacgtgtgtttttattgatcgatttttagttgtctttcattgtgtcctgtggtctggcttccactcttcacgccatagtgaagcattgcccatgcttacgagtggcctctcatttctccctgcgtcgcctcttctgcattctcctccacctctgtaacacctgcccctgcagacacatcctcactgctgtggcctgctctccttcctttgaggaaaccagttattattgccttcctgcttctctgctgcctcctggctctgcctgcgcccctccccagcacttcccagctggcttcagcaggctcactctctgtctcagtcttcccctgggagctcatactgtcagttcagccatttctggcaccaaccccaagtacctctctccaaccctgacttccctcccctgatctagatgtgcactttgggctatgcacatctccacctggatgctcaccctggaggagcaagcatctctccctcgcctcctccctcagcaactccaggctgccctgtggaagcccctcttccgctcccccaggctcacatgttcagagtcatccagcatccatttctctagactcagaaggttcctggccatgtggactctgggtcccagttgaatgggttgaagaatgatggacagagggagaggtgaagacagcaagtgcaggcaggtgaggccgtgaygggactgagactggakgaacagattagagagggttcctgaggggagacgagattgtcaaacgtttttaaacaaagatgggagaaggatctggtagggtagaggatggaggttaaaagaaaragtctttcctgagtccctcrgaaggactcagcaacacctttgctgactggtaacatccgacccagtggtctccagttagaactactccaggctacaagtcctttggaagcttgtagagatttgacagcactgggatgacagaggtcaggattatgtgtcactgtgttgttggtcatatcgacaagtcactgaatagtagtgcgtattgcagtgtgaactggaaaatgaattacagtgcatccctaccttgggcctcgcctgccaygcagccttaggaaagaacaggaagctatgttctgatagaggagccattctaagatattgtggaaggaataaccatgagatgtaacaatgtgtatatcttatatatgtacaagcaagacarcaatgtataagatacagcatcttatactacatctagtgtactgccatctgtgcttttaaaagccagggtggtggagaagtctgtattgatgttttcttgtatatccatggagatactctggaggggcccctgagaacccagccccagtggctaagagggcagggggatcctgtgtaaacaggatcaggctgtggggggctttcaccttaatatcttttatattcttaggtttttgaaccatatgtatgtattataacctctttaaatttttcaaaaatataattaaaaaaaaacctctagcaattaaaatattatttccaccagttgaatgaaagtcaggttgttttgccagggaggttatttggctcctctgaaatgtccattcatragttttctggtggctttggcttattctctttcactttggaggaaatatttctgattcataattcttcatgctccgccctcagagaacttctgccattgctaatgctactagtaaagtctgatctagttttcttacatttcattccttttttccccatccactctacattcatcaccacrttggatcatatttggacaattcatacagacaggaggataattatttgcattcttaaccaggcacagtggttcatgcctgtacatctcagctgcttgagaggccaaggtaggaggatcacttgaggccaggagtttgagaccagcctgagcaacatagcaagaccccatctcaagaccctggcaaaacacagttgctgctgttgagctgtgacatacgagggaacgttggcaggatgctttatgtggtgggggagaggagagctatcttcagctgcttaacagggctgtttgaaaaaggagtggaactggaacaagtagatggactttctgatagtccctcccagggcagctagaaacaactcctgagtgtcccacaggggtggtggtctgaagtggtggctgccacacagctctatgacccgcagagaaggctggctgcatccacgtgtctatccagtttatcttgcwtttggaaaaagaagtttcgactagatggccttgactctaataataagatgttttcttgattattttccttttttctttcggcttctcaaacctggaatagataytctccatgagacccattctgtcttgattctgtcctttaaaaaaatctctaactatgtagcttcctttcaataagtacctctccatctgtattttttaggcaaggtgaaacaaaagagtgactttcttgtcagagcttgaaagagagcaagtggctttaaaagtagactttggctttctaaaggttctaagttttaatattcttatattcgtttaatcctaagtgtgtaatgaacatctttatccaattcaaagatgacacctgggagtgaactggtggtgggacatcacagactactgtgatttcaaactctcggcaggtacatctccgttcatggatgcattaacagccaatgggacaaccaacatacagacatctgttacaggagtgactgccagcaaaaggaaatttattgacgacagaagagaccagccttttgacaagcgattgcgtttcagcgtgaggcaaacagaaagtgcctacagatacagagatattgtggtcaggaagcaggatggcttcacccacatcttgttatccacaaagtcctcagagaataactcactaaatccagaggtgagaggsgctcttgggctggcgtgggcttcgcgcttctccctgcctgatttccaggcctgcctggckgaactggctcttcctgtgctctttctaaacctccttttgggccatctcccgatgcccaccagaagggagggagcagaggggaagttgcgggctttgctccatgtcccacctccaatggccgtgaattcaggatgcttggcctgtgctgagtgtccatccccattctcccgggtgtgggtccacccaggcctctgtgcctctgtggttcacctcctgcctggaagctcttcatctggcrggcacggggctccatgaaggcacgtgggaaatgtgtgtgcacgcgctttgctttagctttcatcagatccttaaagggttctttgttcagacagaatttaagtgcccccggggatcccagtcccttcagaatatttatcatctttccagtccccagatactcctcagcggttgtagcagaacacacagcaacagggatttccacacatgctcattgctgatagtgcctagtaagtaagttttccagaactggttgttggaaaggttagaacatgaattttgtgaagtttctagaatcgggagtatttgaacctaacctatayctttccaaaattttaagtcctagtagtttgtgagtagctaggttgagttttgtccagacaagaaaacttaactacagaaagtctgtgtgttcgcccggggtcacataacaaaccagttcaaagttggtccttggtacatttttagactgcagagtcccttcattgattatttttaaatgcttcacagagatcatttaaaatgattttatgccctaaaattaccagtccrtgctaatgtgcttggacttaacgcacttacgcaccaaactattttctgtcccaagtgtaatagggtagtttttaaaacaaaacaaaacaaaaaacagtagaactgaatgagtttctttcaactggtttgaatgtgccacctgctgtccaaactggagaaatgcccagtgatataataagcaacttgccttatctaagagccgcaatttgccttatctaagagccgcaatggctgtataaatactaagataacgtagattcccatgtctttttaattatactcgagttatgtagttatattttactccatccccagcatctcaatctctggttacagaaaatgagacatttgcaaattaattaaaatcatggtagatatcagtaactgtatcaggctatgatgcatttttcacagatgcagattctccagtaataaaatgcttttaggcagggtgcggtggctaatgcatgtaatcccagcactttgggaggccaaggcaggaggatcacttgagcccaggagttcaagaccatcctagacaacatagcaaaactccatctctacaaaaaaagttgaaaaatgarccaggcatgatggcacaagcctatagtcccagctacttgggaggctgaggcgggaggattgtttgagcccaggagttcaagaccaccctagacaacatagcaaaactccatctcttacaaaaaggttgaaaaatgagccaggcatgatagcacaagcctgtagtcccagctacttaggaggcggaggcgggaggattgtttgagcccaggagttcgagagcacagtgagccttgattaaaccactgcacgccaacctgagcaacagagtgagactctctccaaaaaaaaaaatgctttaagattttaaacccaaaatattctttgccactttaacttctggtgactttcaggtaatgagagaagtccagagtgctctgagcacggccgctgccgatgacagcaagctggtactgctcagcgccgttggcagcgtcttctgttgtggacttgactttatttattttatacgacgtctgacagatgacaggaaaagagaaagcactaaaatggcagaagctatcaggtatgtaaaaatgatgttttttaaacattggttgggtgttttgtttttggtaaaccaatcctgatagaatgggcctgaccaagccttgagaataagatacacatcttctcccatggagagacacgagcagcaaaattaattaaatcatctgtctcttctatgggcctgccataaattactacttgccttgggcaaaatcttttctatgggcctgccatraattactacttgccttgggcagataactgatttcaaggttggtttaaaccctgcaagtgttcggagaatgttctgatgattagagtagatgatcatgggtagccagagttcctattatttgtgccgtgagtrtgttctgtcctcaacccctagataaagatctcttccaaatagtaagttaccatttgctcgactctgaagtaaattgtctaggctttatgatgagatagctccgtaacaccacatggagagttttgttttttgkttttttttgttgttttttttttttgtttctttaaatacaagtagtgcacattcttgttcagtttcatcctaagttccaactggacagagaaccagatagtaggaaataaaaagcggaagtcctccttgtccctcactcccctcaaggtatccaacattcattggtgtgtcttccccaacctttttctgaacattttgttataattttcagtttaattttttagacttacttttaaaytcagaagtaaaaattgtatatacttatagtgtacaacatggtrtattgaaacacgaatacattgtggaatggttaaatcaagctaattagcatatgcattacctcacatacttactattttgtgtgtgtggtgagaacacttaaaatctactctcagcaattttcaagtataaaaatacattaactgtggtcaccatgatgtacaatagatgtcttgatctaagcattttcaaatttttatttcatatatacacacaaatagtatcaatttagttctgttgttgctttgcaacttgcttttttcatgtgacaatatgactttgagatatttctatttccttggttgttggattttcctctgctatatgataacatatatcagcaaaactttctctaaaaccacttaattcgtctaaaatcatatcccctcatttatcatgctaatcactccatgtataattagaagtgtctgatttttcggagatgaattttatttaaaatggatgaaacctagtcatcaacatgaaagttggctatgcttctctactcacctccctaaaatgacatatccccaggtggcccccataarccctttgtgcttgcctttttaacttacagaggatgaaaaatgaaagaaaacgtagactggcaaaatggcagtaaagtaagttggatcttttccaaaatcccagatttctggagggctgaagttgaactacttttgatagttactaggctccagctgagcwctgcccttggtgcactgggctttctagcacctaaacccttctagagcttgcacrgcaggattggtgtggtgggtaggggggctcttttttctgttttgttgagtctggggtaggcagggacgtctttctttgactgacacccaagatggctctgatgggcaccaaacagcccatcacaggagtcctggaacccacacctctgggttgaaggggattgccttagcctctcatgacatatttaatcattttcagaattactatattttctcatatgatgtacacatgtatttaggaggttatcccttaatcttttgaatgttaccttttacaggctatcacattatgtgtggtttttttcagaagtggtttgaaattttatagtctgatcttattaagtattgtttctaatctcctaggggatttcatccctgtggtacactaggtgggaccatcttgttcttcagtttaagattaaactgcttgatcagtgtcataaatccttggctgactctcagcgcctctaagacagcttcattattatccattcagggtgaattccatgaacttaacttttatttttaaaatacaaaccaccatgcctcctatggtcactttgcatgttctccataatatcacgctgaatgtacacataatattgtgctttttggtagctctgcggtcataagaaaatcggatgtgtcagccagtgccttctgggtcctggctccgttttcccgtgtaggcttttccctggctccacttgtgagcccgctggtgcctcgccgggtgcagctcactcctccctccagcgttgaattcccttggacagaggctgtgggcttgtggcgctgggatcagtaaaagcagaggaaagctagatccagccaggtttaagtggagatctcctttgttgaacttgatgtcactttaaaagttcactttcatcagctccctgctccgtccactctccctactccacacaaaaagctggattgatattcttgtgaagagccaagtcctgctttaggaaaaccaacttgtttcttctttatgtgactatatttttgtcaatgtgaattttccttaatgtagtctggcaagatcagaaaaataattagttacaccagagtcacttaacctttccttttcttatttgcatttaaattaatttttatgtggataaaagctcttcctgtgtatatttttcatttctctggtgtcttgtctcatgttccttaaaacttggaggcaaaggacttcatcgtagcaagtttccaaaggaaaagcrggaagcaaacaggaagatgaggtttcatattaggtcaccaggtatctagagcagctgactttgtgacgaggattcgtggtttgcagtttgcagggtaattgcaacaaaaatattctgcacctttgtggttagaacaaaattctttcaagttcatggacagcattaggcttttgaagtctgccrgaaccagtagctgccactgggttttaaggaccaggagacttctctccccaaaagtgaggtttcttcttcctcccacagagggagaccgggggccctgcccaagcagtgccccaggggcaagaggatttgggagagaacaaagtgagccagtaaacatgccccatgaccctgacctgtaccccattagtccttcaaacgaaggtgccattcaaatgagagagacctcagccatggaaagcagcacactggctgcccaacttcaggtccctgctgcctccttctccccaaacgttcctttgacagtccctacatcttatgtgattttccarctgtttgatatttccagattagtaaatgtcctttaaaggaagagttttgtttaattataaagtctttttagactaattatgtggcaaatatcagcctccttccctgccatacccaacaacagccttgaattcaattccaaagaaacaaatttaacttcagtacrttgcatggcamacatttgagtgttcatacattttgatttcaagtttaaaacacacttggctgaagcccacagaagcaggggctacttgggagaggaccgtcccaggcttgaaggcagcccctgcctcgcctctggttccttgtgccttgatttgcagctcccttggttaagcctttatggtcctgggaagtttctactaggcagagaaagcatttctgtaaaggttttcttttttaaaacaaaacgagtctctgtgtgcaccacatccatttctggcatctcagggctcactattcagaatggccagttcccattccctgaaaagggaaggggctctttgctccagagcatgctggttcattcataccccgtccagaaagagccaccagcttcaggtgaagtcaccattccaggcaaaagtaaaaataaaatttcagttccaaaaaaygccttcagcctatcaaaatctaagtttcgacttaccaatatctattaatattttagaagcagatttttttatacaaatatatgggcatggaggcaaggatatatgaaataattccttttactgtttttctgtagaattaccttcttattaccttgactttgatcatcgcttttatgttaatttattgccccatccgtggtttccagatgtcagcctgggcaacggctataacagtttgccttctgttccataaggcagatgaaattggagctactcagattttggaaacagctgttccttatcattgagagacagttcagcagttttaccttttcrtgagtcatcagttactgggcctaggaaatgtatttccatcttgtgtcattgaccccatatcttcaaaagatgacacaactgaaatagcttcatgtagttcttctaggcttatttcaagagtctgcttaaaaggttgtctgacactctgatcattaaaccccagtgtgatctttctaagaatgcctcaggctctctcatttagaaagacttagtgcaactcattcatttgaatgagttaattcttgctcaatgcaaagatcccacaaaccttgggggctaggctgaggtccagccgctaaactctgcaattcctcactctcctgttcatacacacacagacacaaccctcctcacctccctgacctgcccctgccaaaaaatatgagtcatccrtcagtgtctcggggagttgagtggggagctatctcagatgctgagtcatgattttcagagaagatctgaacagattgctgtggttttaaattgctgaattgtagagagcatctagattgttattttcagtattaaagatgggggtcaggtttagaatccagcaagtgaaaagctgtccttactctgcacttctgatctagaactcagcctgcactgaagggactatcttgtgtttcttcttttctccactgtgtgaaatcataacaagaaacaacctctgagcataagatcagcttctagtatttaggggaagaaaatgcacattcctaaagtggtatgacaccaagctaccctacattgaaaagcagcctacttttccagyctgatctaaagcaaatcccaaaatagcatgggcttgatttattaaacctctgtcctgtgcagaggctgccccacgcctgaccccactgtcctccgaactcctgctgcagccgtaccctccagccctcagtggagcaggatgtgggtacaggcctgagccctgtgctgtttgctcttcttgtttgcrggtcgcatgtcttgagccagcctgtgacactcttgtctctgtatcccccagactgttcagtccacttccacataaactcaggaaatagcaattattgccagataatcagtgagctgtctgaaatcatgaaccaaggccagacccagatcccagggtttttgtgaaccctaatccaccaccgtacacttaacaccaggcagtcttagtatgccctgggccagatttcctctgtgacagcttcttgatttgtcttgtgaagcccagaatatgtactgggctcctgtgtcttcgagggaagacaggttggggagcaagatgtgttgtttatagagcccgagagccacctgcaaattccagtgcagctcatggctgcatgttaccctgtggccttcacgtagggcctgtagtgacagccactacatgcgtgggctccaggctgtcaccaaacctttacaacacgtagtaaataagtctagggtccacaactgctggggaaggccttaaacaaatctcaagtcttcaggatttccgtagcatttacatcttggtaaattgaattccataatagacttttcctttgctcaaatatgcaatgttttgagtaattccccatttatttttcattttagaaacttcgtgaatactttcattcaatttaagaagcccattattgtagcagtcaatggcccagccatyggtctaggagcatctatattgcctctttgcgatgtggtttgggctaatgaaaaggcttggtttcaaacaccctataccaccttcggacagagtccagatggctgttctaccgttatgtttcccaagataatgggaggagcatctgtgagtacctttttaaaaaaaaaaaaaaaaagtcattctagaaagcttcctgaagaaatctagtttggttattgtttttctaaagctgtacagtgtgtcattctgtggggactttccatcttgtaattcakatttgggttcatagacgttgttgacctttgttgcatcattccctagagaaggacttcattcactgaggagcctaccactttgcataattcacatggatatctactgttagtaaatacccaatcagtaacccaaccaacaatttgcaattgaaaagttcttcacctaataacttaaaagctgcacttttaagagaaggcaattttaagagggagcaaagttacataggattagagggttgtcgtccatataattgtgtgtttttatttctttaactgtttaatccgttcattatagtagtttgtgtttgtattgtagcttgtgatttatcaagcagttattcacatctcattctctagtccttgaaatagggcaggaggtggtgtcacaggtcaggttctccagaagcagacactgagatgagtttggcacgtggagaattagcaggtagtcagtacctgtggaagggatgggaaggaagcaggaccgcacagaggaagaggtcaaagtgatactatgcccatcatccttaggggtgggatgtgcgggaagcgttgcaccctggacgaggtggctccctacagctgagggcatccctaaaggcgccctgtggccgtctgctaacagcagcacccgcagccaggcagccaggcctccccaggagcgatcatggcagcacagttccatgtccaccacagttcaccccagggccattcagatcattgatgcaccttttgggggccagctccttcaggttccaaggggctttctttctgggagaaacttagaggaagaagattaggcagcaataacttgcaggccagaacctgaaatgtttaacctggatgttataatcagtgggtaaaagtgtgatgagaaaaaggatatttggatcctctcattatttgcagtgggaaaaatagtaactttacagtaaagaaacctggcagctaccaccttgccgagtggtcagagttcacagaaataagacaaaagccaacatgaagcactgaggggaacacagccttcgtcgctgcgtgggatttctcctgaaggtgcagcagctcagtctcatcatgaggaacgtcaggcccagactggggggcagtctgcagacacccgcagtgctccaccaaagcgccaaggtcggagaagacgtggaaagactgaggaaccgtctcagactggaggagaccaaggggacacgacagctcagaacatywgggacccaggatgggctcctgggccagagaaaggacaagagtgggaaggctggtgaaattcacatcatgtttgtagttgagtgactagcacattgtcagtggctttggtcatcttaagatgttatgtgacattttttaacctagggagagctgcctgaaggtttatgggaactctgtactacttttatcatcttcctgcatctaaacgtacttgaaaaccagaacrtttaaaataaaggaatacaagagaggaggaggaaggtgactaggccagactgtgtcccccagtgccgcactggtctcagagctgccctgctcctcaccttctcacaccccagggtagttcccctcacccatagctcccacctctgctggcttcagcagccgcccaaatgctaaaacactcacccccaagggatctgtggcctgctyactgtgcccagctcagagttgctgcacttgtccacttaactgctatagttgatcaggagaggaacaagcrgcacyggcctgcatcccatttcccaggccacgtgtccttccagatagaggtctttgtactgtatgtgctacaaatcagaaaacgctgctgcccrccatcatggagccacctccaaactggcacctctcaggccgtgccgacgccctaccaggctggcggctgtggcaggtgctatatgtgacttagccacaggactctcgggtcctgtcccctgacatggtctttgctgtgaggctggtgttctggtcacaacgcaccaccctgaggcaccccatgctggtggactagaccttccatagccacagagagtgatgctgcctgaggatctgcaggtgggacaggcagactcagacccagaggatatgcccatgcctgttggagccgtcagcgtgctgcccagcgcccacaggcgggcctccctgggaatggtgtcttgtgggccgatcacattggcatctcctgctggcaggctggacactcagtagcaacagcgactgcatcagcctttggtragtcagagactgtgctgttgaggcccctctggccagccctgggtggccagcgaccaccagccatctctcaaagctgttcagtgccccctccatggcggatgctctcaggtggacattaatgtgagacagcaacctgcacgcttcccattcctccacccaccacacgcctctgtccaggacacccacccctgctggcagctagtgttattctaaccttgatccacttttttttctacaccagggggtgaccaggtgcatctgcccccagtgggggcattttcctcaccacattctctttgaggcctgctggatgaggctctggtgaagttgctgtcccctttttggcttgcccatccacccagtgagccaacccacccacaggccacactcggtcacagggagtccccccatggctgtaggtatgagctgaggcagggcgcaggtactcaagggtctgggggtgacgcaggggtctaggctgccggcccatgccctctggagcttgccaagcccagctgtgcatctgccgcgggccctgcctgaccttgcgcctgtggggctgatggaactcagctcgtggtggtcactccccacatgtggtcatgtggggtcccgtggtcgggcgctttgcctctcccagtcccagccagcactccaggcatgcccttccctgctgtggatggcyccaccggctgtgctgccctcctccctctggcactgaccacaggctccatrtgcatcttgtcccacccctccctactcagccctggcctttcagcctcactcagcagggcccccacctccctcgtgcttccagtagccatcccagcagccaggtcagaccatctcctgggaacctagcagggccaaatcagtwtsgcaggagagcccccacgtcagtgaatctcctgtccagcttgtggttgggccccaggtcaggcgccctgagaatccaggccctcgtgttttctcacagctcccacctgcacccttggctgggtcgtgcagcccgtttcagggaagaggcgagttacaggcctgacgccaggagaggggatggggcaggttttggggggcagtgttgccttgctgagagatatttgccttatcttctagcaaggggggcttacgtgttctgatagggatgggtgggccatgtccgtaggctcgggatcagaggaagctggacttcaragttgggggcattcacccagaagcgcctataccaagttctagggtacctccmcacccctcacaagctgacagaccctcctccagtggctgattaacctgggtggagcttgtccactcttgctgacaagtccaggggctaaggccaagtctcagccctctctgcctcttgctcccggctgcccctctgcttgcacccatgtcsctgccyctcacctgtgagagtgttagcacgtggacggctgcctgtgccaggtactgtggcttctccacctggcctgttggggggtggtccctcattgccagctggggagccgtgcagtttctaaacctctctcttcaccctcggtctgtccactcccctcgtcacaaggtggtttctctggaagctaagatagatttgggaagcagggtctggtagattaggtgccagcgtccatggaagggcagaaaggaagcaggattgggcagagctgactgacagggagctctggaaccacgtggcctcacggcggttcccggtgccccactgcagttggccgtggggttggcggccctgggaagagcggtccatgggggaggccctgagctctctgttgcctgctgacagcacttcccacagcaggcagtttgctggggtggggacgtgggtggcttatccaagtcatttgctttgtcctttacaccgtactgcacgcacctgacaccaccagactcccatggtagagtcattatcagtaaaatcagttcatcgtagtgattactgtaaacgagactgtgtcctgccagttaaccctgtcccggcaggaaagaatcctcatcgtctggaacatcccgtgaatctcattttgagttatttatccaaaggaggttgagatctgaggttctgacccctcccactgtatgatctatgtagatgtgtggtgtcggtgcagatgtggggcaaatactaaaccaccttgatgttcagacacattttggccaaagacattttggaagtggagccctggagctgaatgctgctcaggggtagaggtgtcagagttcaccattcccagaaagggccrtgaggcttgaagtcatcacaggacgaatgcctgccctctggtcagccgtgtttctccctactctacaagccttggcagatctttactttacgcttcccctggagatgtactggtgcctcttgagctgctgctttcaactgggcagttttcacccccgacctcacccctggggaacaatgtctggagacaacttggttgtcacacatgaggagatggccrttagyagaggctggggtactgctcrgcaccctccatagcccacgggacagccctgctyagcaccctgcatgtagcccccacaggacagcccccacaccaaacaacagtccagcccagaatgtccctagtgtccagggggagaaaccctgctctaactcaagagcgaagagcctgcatttcactcggcgtgaattctacactttctgagcagagtatctgacgaagcctctctacagaaagtgaataaacgttgttcagatgacttcgacaactcttgttgaaagtgactatgcagatgatgtaaatgatgtcgttcctttcatgagcctttggtgtacttgagctttcagcagcctgaggcaagactggacaagtgtggttttccccactttgcatgtgcagagctctgccaggaggataagctaaaggaatcacattatcaagataaaaagaatatgcaaatagtgcaggctgtgtggcctctcctttcttacagcaggccctccgctgtaggcgagggctacgtaaatcagccaaggagtctcttccagtttagccttcctggtgcccagtagacattcatggagtgcatggaggatggcacggtctgacgcccacaggctcccacgtggaaatcttgcacctctcaggggcctgctggggtgtgaagctggagaatgcccagcgagtacctgagggccttaccccacgctcacaccttgagagccctctcttggggacttcagagactggcctgagggagcaggtggtaaaacctctgccacagcagtccccataaggctgaagattcctggatcccctctgctcatactgggccagtttcctcgccacccgtcctgctgtactctggccaaactaaaaagacatctctatttaactttcctcggcatttcccatctctctggatggttccaggataactttcttttaatagttggacaactttgaccacatcatggggtgatgtaggttgtctacagggagtccctgtgcactcagccatctcagagcaacstgctagctggtcaggttcccaccgcctgcatctgtgtgaatcggttatttgggtagaagtttgaaacctctcattttgaaactactgaaaatagtgtgtttatataagaatatgctcaygcaaattgcgtgtatttaatcctataatacawatcttaccaagggagatttgttgttgttgttttcttgggtgactgtcgttcaaaccaactcactggccgtgtttaagtgaaaaagctttaacaacctagcgtgagccctgtcatttttgctcttgagtaaattgagaaatgcccttgcttgtcctgcacatccaaccacctggaatggagaacaccgaaggtagggaaaggatctccagggatgagcaggcctggagccggcggggctgyggaggaagaccggcygcaatgagtgagtgctgagcagagagaagggccgttctcggctggtatcaggcccaagagagtcaacaaaggggggacgaaagggagacagggaagagaacagtggtggggctgtaagttgacctccaggtggcagaaaataaagttggaagaattgactgggacagacagccagggccctgcaggaagggcgggagaggaagcctgcggacacctgccctttgtgattgaaccgcagacaccaggcctggcggggtcgcttgcctccgctgcccaagctaaggctccrctaagctggtcctgagaacatacttcatgctcaacttcagggatgtggctgtagtgtcctcactctatgctgagaatgaaagaagcacagtctatgaaaggaaaaccccgacagcacagagcacttcgtgcggcagcagcacaccgggagtcccactccctttcctgctgcgtttggatctgccgtgacaaggactatcagaaccactcacagtaaggtcgggtcgcgtttctaaatccactgtttatggaccgtcttttcactgagaagaagctcgtcagttcaggggtttctagaacttctccagactcttcaaaaactcatgactttctccaagttggtaatcccagcactttgggaggcccaggcgggcggatcacgaggtcaggagatcgagaccatcctggctaacacagtgaaaccccgtctctaccaaaaaatacaaaaaaaaattagccgggcgtggtggcgggcgcctgtagtcccagctactcacgaggctgaggcaggagaatggtgtgagcctgggaggcggagcttgcagtgagccgatattgcaccactgcactccagcctgggcgacagaaggagactccgtctcaaaaaaaaaaaaaaaaaacttgcaaaccctcatgaggagcctgtccccagccctgttttccagcctctgcctgcatgggaggggcagtgagtcagccacrtgtttgctttgccgcctctgcctgtgtgctctccaagctgcgggtttcacrtgcagtaaacggcatcaagacattgacagaaggtgtatgggcagtcttacactgtctcagcgacttcagggccaaaactgtcttttgtgattttgcctcttttggaartggaagccacctaccgaaattgtgttttaccagagccccaggagctcatagtcaaggctttgtgacatcagagttgttaggaaggttaaccgggcaagataaacgacagaccaaaaattgtcccctcaggccagtgtggagtttctttatcagacatgtgtgcaccccttcccgccttatctcggcatctgtgagcctgtcatttgaatgatgtaaaatccatacatgttgtactgagaccttaaaagtgatctagttcagtgtcatgtattaaaaaataaagtgatctagaatccaggacaaggttaaaattaatttcatatatacacatatatattcttttaaagaaaacctaatgttagctttctccactgagccgtgtgaggtgactgtagccagcccctcaagcagattacggtcatttttcgccacattcaagccctggatagttctgtcttttcgtatccaagcgatacaaggcagcctccaaggtacgctctagcagaaacggtcgctgccattagaatattttttctgtatattaaaaacaagtcaccattggcctcccagataaagaaaaggtttggtaggaattctgtgcctggttcaaatccttaaaattataaattgcctaactttgcatatgctgattttcccaggattgttttgtgtattaaaagagctcacacgtgggaagggccggcattagggggaggaaggcagatgrgaggagaggaagctataccagtaactttttaaacgaatggcaaaaagaccttttctattttagatttctttattgagtccctgtaattctgtagtaggttgtaaaataagacactttttgctttcctttttaagaaaaaaatcatcagcccgatagattactttcccacctgcccaatggactgcaccttgcacagggtctgttcccagcggcccctagaggatgtgccccatttccctgcggggctggtatttgtgaatgtntcccttcggtgtggattttaagggatgggtcttccccgcccgcctcccaccgcaattcatattacatccactcttcttccttgcaggcaaacgagatgctgctcagtggacggaagctgacagcgcaggaggcgtgtggcaagggcctggtctcccaggtgttttggcccgggacgttcactcaggaagtgatggttcgcattaaggagcttgcctcgtgcaatccagttgtatgtctaattgcttctgttacacgttactttttaaaaaatagaaacttttccctcagagagctcacaaatttgcaattattcctaagtcctttacgtttgtcctcaacagagcaccttcccgtgaagtcctgccagaacctattgccgccactgcccccacgcacgccttgccttccctttgcaaatacccaggaaccacagaaatggacttcagtctgaaatgtcagcaagttagcaaatgtcctatgaaagtcaacaacaactaacatggatataattctttactggttccaaagcctttcagtcacattattagcttctcccsygtttccccacagtgggcctaagttgtttttgggttgttgttgtttgtgagatggagtctcactctgtcgctcaggcttgagtgcagtggtggaatcttggctcactgcaacctcaacctcccgggttcaagtgatgcttgtgcttcagcctcccgagtagctgggactacaggcatgcgccaccatgcctgggttatttttgtattttcagtagacacggagtctcaccacgttggccaggctggtctcgaactcctgacctcaagttgatccacccacctcagcctcccaaagtgctggaattacaggcatgagccactgtgcccggcctcctaagtttttgtttaataaatgtgctaaataggccgggcacagtggctcacgcctataatcccagcactttgggaggccgaggagggcagatcacttgaggtcaggagttggagaccagcctggccaacatggcaaaaccccgtctgtactaaaaatccaaaagttagccaggcttggtggtgcacgcctgtaatcccaactactcgagaggctgaggtgagagaatcgcttgaacccgggaggcggagattgcagtgagcggagatcccgccactgctgtccagcctgggcaacaaagcaagaccctgtgtcaaaaaaaaaaccacaaataatttttttttaaaatatgcttgtaacaaaattgcatttggcaaattataggatgtgaaatgtataatattaactgacacgactcccatcccaggcagacaagcaaccctcattaygaaaattacattttgtttagaaaaattccctcaacaggcatccccagagctttctgggcatcagcagagcagacgtccagttcgggggtccacgccagtatgcggcagtggcgcggggccgaggctgmtcacaggmtgggtgccgacagcccagctctcctttgaaataagccgttttgaagttaagaatgcacccagtgccaagtgtgaaatgtgctttatacatatgttaggcccgacatattgtgagaaaatgtctggtaacctttttaacaggtgattgctggaatttgatgattgcctccgtaaatgtggaggcacaggggacccgtgtctgcccgcatgcaccctgctaactggctgcttgttttccggtgcaggtgcttgaggaatccaaagccctygtgcgctgcaacatgaagatggagctggagcaggccaacgagagggagtgtgaggtgctgaagaaaatctggggctcggcccaggggatggactccatgttaaagtacttgcagaggaagatcgatgagttctgagtgtcgggctgcccactggtgacaccgggatcgggctgagcaggagaacatcaccggctccagttsccctgatccattctcacagcctgaaacaagctcacccgtagcttacgcttggaagyaggactgggaacatccacgctatttattatcgaggagttttaaagtactgtaactttaaaataaataactacaaagcttctttgtccaaacgtcattattttatacttatatacacgcaggtgtaaaagtataaaggtgagcactagactgctcttagaagctctaatttttgttttctttggctagtactgtataaaaaacagaattgtgttttattggttttggatgacagaaaagtctggaataatgtttgttttcctcatttcttccttctagaacacagaatctaaaggggtrttagccagcctcgcctccctgccccacgtagagacacagagtgatgtgaggcgttggctttttctccaagaaggtacagatacctcagattcgggaaactcaaaatcaaaagacttagcttctaggataaatacttctgatgaaaaatccgctgaggagcataccccaaaccagacatatgcttaggattcatgctgagatatcaattggtttccccttctttttaaaatacgtccagttcttacccagttaacatgaagaaaccactgtctctagaagaaagcttgttttgcagtattagtgaatcactgaatagcttaagtatgactatctaagttataagttagtctttagtgggttttaaatagtttttctgacccttctgaaaaataactacataagtgcttcttgttgctgggtgagaaatactactttatagacagttttggttttctgtttgcagatatgattgatgtatttcaccaaaataaaatatttttatgtttataaagtgtaatttttaggttcacttagaatatattttatttaataagttaaaattcttttggcacactattaaatgcaaaaactcctttcaaaacaaaaaagaactaccttatattcaacatttaatgttcttggcctctgcttttatgtctatacaatatactgagttcagtatggtgtccaagagtgccctgtgtggatagacatgtgcactccttccaggagtgggtactgattccagactccagatgcctattattagttaggcttctgagcttgcaatcatattgaatgtatgaagagcgaaatcaaattcttatttttgtacagttttgaagtttatacttagaactgaccacctccccggccacgcggagagctgtacagtgtgtaaatctgcctttatcttggattgattggtacagtatttttgcatctgtgggacctaccttttcgttcagtagtttgaactatatataaactgtacaatctgtaaagtttttatagaataaatattcagctgtgaaaactggttaaataaaactaatatttcttaacacatttgaaatgtttctctgattcttgtgagatttctcatgggatgttttctctttcgtgtgtgtgtgagatatacatgtgtgtataaagcatctgtacagttcaatggaatgaaaccctgtgtgactaacacctaggtaggacctaacaatttgaccagtatcctccctggtcaccttcacccgggtgaccatttcctcactttgtgtccatcatccacttctccttcaaagaacttattcctaaaataaattacttttagttctacatgtttttaacctttatatcatatcacaaataagcttctgtgactgactgacttcattcactgttaagttttctcttacgtagagttgtaacttactccttctttacccaaacctgtcgtggctgttttcactcctgttttacagatgaggaacctgaagaattaaacacttgcccaacgtcatgtaggtaatttgaacaggagtagcatgaagcttttacccaaggtcgatgtggcaaagcacatattctggcaaagacaccaagatgtcagtgttgtagaattcacaaatagggaactgagtaaaatctccaagttgtctgtctgcatcatccgagactttgaatcctctgggccttgtgagccacctcccctttttctgaagcaaaccttccaccttccaacttcttgcacaagaattgatcccaactagaagtagcactggcgacagcagtgaagtgcttctgttttgtgccctgcgtgggtgaggaggaagggaaatgcgactgctcaggtgggtgaaagtctcggtccaacttttgaagagaatttgacagtaactgtcaaatataaaaagcctggacccagcaactccatcaataaggattcatcttaaggaatgagtggtcataggaaatacaacaataaagataggtacgcagttaagttcatctcaggattgttcctgacagtgaagcattggaaactgcattcatgttcctcagtagggttttggttaaataattgtgcaacaccatcacagtggaatacacatttattgaaaaagaatgttgatgaaatcttaggtttaaagaaaattgtatgctttaaaaaactttaaaggatatgcatgaaaaacatcttgtatatatccagttctctcccctagagcttcccagctcctgggcttaagactgctcagcccctcaaagccaaagtcgggagcctgttacccctgagagccagagacaggcacaacagccaggcagccttgcttcctcgaccatgagggtaacagtgatgatggcacttaacactgcagcataaaccaggctcgcttcgaaacacttgatgtccgtttgctcattcagttttttgagattattttgcagagaatattaatgtaatacacattaatatgcttttcccagatccactcactgagcccatctggtggcctgtctgtactgacctctcctgtaaccaactttccccagctcgtggccttcctgtcctagcatcactctataaaatgagaggtctcaaatagtctttaggcaggctgatttagtttgtgatgtccccagcaatactagtgacagctacagaaatgagaagaacccagaactctgacgatcttggagggaaaagtgtgccaactacgtaaacgggactgtagatggcctcagacgggctgctcccattctctcgccccatatttggtcaagagggagtgaggggtgcccccagtctctgggcacagcaggagcctagggggctagggccagcctcatggccaactccctctcattgggctcctcagaggctccaacccactggtacacttcttcttacactagtatgaacaagcgttacagcttctccaaaagaaaatcaagttctctcccctagaggtaaatataaatatttataaatattctaaaagaagaaaatatattttctgtgtgttgcaagagaattggcacctgccaaatagtgacacacagcttaagagggaaaaaccctggggacacaggattctgtcattgccctagggaaactcagtctctgcttttcccaggtccgctcactgagccatctggtggcctctctgtgctgacctctcctgtaaccaactttccccagtgcatggccttcctgtcctagcatgcagacaggagctttctgaggcttttccgacaacagccccaggttcatgccccaccaagtgtgagaagctgtttctaagccgaaacttttcaaatggactccaggacatgccagggagtcccgccctctagaggaagggagagactcgggcaggtgaaagcacagataactgggaatatgagaccctggagtacagcccagaactaaggaggagaggagatctccgatgtttcgtgcacccgtttaactttacatgtgaagaaactgaggcccagaagggtcaggccacttgcccaccatcacacagcctgttggtgacctagcacctgggaagagagggctacactccactgctctatgcactcttcccttaagtgggaaggcaaggaggggaccaatggcctgtggtgtccagcccatcctggcatcccatgggcctgtgattctctgcaagtgagagtggtggggcagcatggcagaacgggtggttccagcctgcccagtggctctggatttaggctattttcaagtcaacgctaaacttaccagggaattctgatggtctacaagctttctgcatctgtaagagctggaccagcccaccgagctctctcaatactaactagcatttaaaaataaataccttcactatttggcaacaggggaatcctctcctatcacaggaatcctctccctcttccctagggaacgttctgacagcatgtctgtctgaagaagcaaacgaatgtctgctttggtgaaaatgacattgaatgatttcaaccctggtttaaaacttacttttttggcaagataagagactagcatttcaaaatttaaaatctgttttatgacctttagagtcacaagcacttaaatggctaataaatggtttaatacaggtattagaataaaagctaagatctaatgtatttaacattaattcttattttcttaaattttatatactaaaactgggtaaattatatacatatatatgtctatcacctgtatgaaacacactgcataggacaactagacagaggatcaacaaggaaatagaagactggaacaacattttaaaccacctagacgtaacacacctatacaacccttcatccaataacagcagagggcatatgcttctcaagtgcacctgggacattctcgaggatagaccatatgttaggcaataaaacaagtcttaaaagtttaaaatgattaaaatcatacaaagtatgtcctccagcctcaatggaatgcaatgagatatcaataacaaagaaatgtggagaattcaaaaatatgcggaaattaaaccacattcctaaataacaaatgggtcaaacaagaaaccacaagagaaattagaaaatactttgagatgaatgaagatgaagacacaacataaccaaatttatgtaataaattatataataaaacatctatatgagaaaagtagatgccaaatcaataacctaatcttctaccttaagaaactagaaataaagaaccgcaaactaaacccatagcaagtagaaggaaagaaatgaagattagggcaggagtaagtaaaatgaagtacagaaaaacagtagagaaaaatctatgaaacctaaagtcatttctttgaaaagatcaacaaaattgacaaattttagttagactgaccaaggacataagagactattcaaatcaccgaaatcagaaatgaaaaggggggacactactaccaaccttagagaaataaaaagaactataagagagtgctgaggaatcgtatcccaacaaattagattagctaaatgaaatggacaaattcctagaaagacacaaacttgaaattgactcaagaagaaagaaaaaactaaaatagacaaaaagattgaatctgctgtcaaaaaactttctacgaagaaaagcccagcactagatggcttcactcataaattctgtcaaatgtttaaaaaggaatcaatgccaatccttcacaaactcttccacaaaataagaggagtgaatgcttccttacctctataaggctagtgttgccctaataccaaaaccagacaaagacatcacaaggaaactatagaccatatagactatatatttatgttaacattccttattaatacaaatgcagatattctcaatgaagtaatctgacaacatataaaacttatatgtacaccattaccaagtaggttgtggtgaactgcaaatgtgccactgcactctagcctgggtgacagggcaagaccctgtcacaaaaaaaaaaaaaaaaaaaaaagatgctcaatgtcagccactatggaaatgcaaatcaaactacagtaagacatcactttatcccactagaatgactataacaagaaaataccaaaaactgaactaatacgttcagttataataacaataacaaatgttgatgaacatgtgaaaaaattgaaatcctcacacatttgctggtgaaaatgtcaattggtacagccacagtagaaaactgcttgatagttctcaaactggcataaggatgaagttaaacttcttaaggaactcttaagccttgcaattctacgtctagtatatatccaagagaattaaagataggtactcaaatacttgtatgtgaatgttcatagcagcattattcataatagccaccaaatattcaccaactggagaaaggataaacaatgaattggcatatccaatggaatgttatctggcaatacagatgaatgaatgaggtattgatacatgctacagtgtggttgaaccttgaaaacattacgctaagtgaaagaagccagatgcaaaaggccacatattgtatgattccatttatataaaatgccaaggattggtaaatccatagaaacagaaaatagattcgtggtttccagggacagggggtgacatggggcaaccggagtggggagcggcaggtacaggtttttatttggggggtatgaaaatgttctggaattaaataatggtaatgttcacacaaccttgtaaatatcctttaaaaattgaattgtttgcctcttaaaatggttaattttatgttgtttcaattatgtctcaattttttgaacgtgtgtgtatattatatatataatcctctaaactaacataaggagactatggaaaaatacttaactgatccgaaatgtgcaagaaagatgtgaaaaagcaacatagactggcaggacaaataatggcacatagaaaatatggtatattttatctcaaaatattaacaaacacattaaataaaaatagactaaattcttgtgtgaaagctaaatattttcaggctgtattcaaaatatattgacctagatatacatatatgctgttgacaagaaaagaaaacgcatcggaaactgaaaagttgaacgtaaaaaggtagaaaatatatactgtgcaaacaataaccaaacaaaaactggtgtagctatgctaatatcaaaatatctattaaagcaaaaagcatggtaggaaaaagtttttcataatgacagcagactaagttctattgaaagatatatagttctaaatttgcgtgtaccttgttacttatcctcagagaagaagaagaaaaggaagaacaagaagggaggagaaggaggagaaggagaaggaggaggaggaggagaaggaggagaaggaggagaaggagaaggagaaggagagaaggagaaggaagtgcgttcagcagcttctaaactggctcccagtgatcccgacctcttgctcttcacatctgtgtatgatgtacggctagacctggtgactcgcttctaacaaacagaacatggcaaaagcagt

SEQ ID NO: 94310 - DNA, 230594 bp, Homo sapiens
  misc_feature (1)...(230594): n = A,T,C or G
cttatgaatcttaagcaaagtctatatactaagagtctcataaaccatttgagcatgatgtaaataaatggttagttaattacattaaacagcagttatcgatgagctgccataaggcaggatgtgattgagtaccaggcattaagagctgtgagatcaaaggggattatcagtttgaactgggacagcttcaggccactgcaacgtgggagagaataaagcaagaacctctgtgtggcttgaacatatccagtagaagagtggcatgcactgaagctggagagaggtgctcggtcccccagggccttgaacacagtagatgtgggtcttatttagaggatagagggatgccattggaaggcttaaagcaagggagaagaatggtccgatgttcattttcagaaagtttcatgagaaggacatgttagaggaggaggagagtacaggctggaaagctgctattgtaatgtatgccagagatgatgatggtgtggactaaaaggtacagagaaggaaacagactacaccctggagagaagttcaataggatgtgctaatgtagggcctgagggaaagggagaaatccccagtgcctcttaggtttcttgctggagtgaatgagtagatactggtgccacttacatagaggaggtgccagggataggcttggatgccaggagccctgggaattcgaggtgaaagcacagagcctgccaacagcgagccctcatttagtgatgtgcgaactgagtgtgggtgatagaacctggtgtttgaggagggaggataccacgggtgccacccaagtctgcagcgggacacttggcctcactggtcacagccaaactggttgctggggagtgaagcctctggagctttcctggggatgctttgtcatctctgagatgctttgagtagtgctgccgtgtgggttctgtgtacatatagctagtttggagaccacaggtgacaaattatgctcctcaggaaacccaaacaagataacacttagtgggatttctcaaaacagagctccctgggtgcctccctggctgatcagcaggcctctcctttgagcagagtgacctcaggtgccctgccagccacctgcatcactctctctcccggtggcaccacccagaaatgaggaggaagggcttgatcttgctcatcagcctaaagcactgcagtggtttggtgggaaacttctaggaggagttagagtagtttagcagaagctaagtcctgcctctcaggtgtcacagaagggggggccagtgtgaactggggaggtagtgtgtgtgtggatgtgttggttgtcaggtcttttgcctggaagctgcagaatggctaagttccttacctcaggctcctgtactcttgtctgagtccttcaagagccttttgctgtttgactttctgaagaccatgtggacccgaatcatggctgagtactaaattccttgccaatggtttacttcctctacatgaaaggaatttcactgggctcaggagaggtggctttattgaaaagcagattgatgcaagttgccagccaagtcattggggtgaatggatgaagccacacattggttatatttttgaaggacattgggtcagattctgtacttgtaaacatctcccccttaacgagccctaaatagccacagtttgaaactaagcttttccctacccctacttcctgttaggattttagtcagaggatcatcaaatgtcaaaggtaggcagtatcacttgggaagtccaagtcacagccttttactttagagatgaaaagatggagggccagaaaacagaagcaacccaaagtcacacggcaggtgaaatgacctcactgggactgacttcaaaagaaggcgaaatatgacaaggtcttaaaaggaggacaaagcaagtaatgggggactttacaagctggtgaaataattgccttctaggatgcctgggtggagagtcagggcagactgtccaggcattggacatggacaggactgcatagaagcatatatattgaaggttacctcaggtagagggaataccagaaacggcagtggtgggaaagtgtgtggtcatcaaagacaagtagtcctgttgggttgaaccttgataccatcatcttataagaaatataggccaggcagtggctcatgcctgtaattctagcactttgggaggccagggtgggcagattgcttgagctcaggagttcaagaccagcctgggcaacaaggcaaaaccccatctctacaaaaaatagaaaaattagccagatgtggtggcctatgcctatgcctataatactagctacttgggaagctgtggttgggggatcgcctgagcccaggaggttgaggctgcagtgagctgtgattgtgccactgtactccagcctgggtgacagagtgagatcctgtatcaaaaaacaaaaacatgtagaggtcatctcacaatcttgcagcaaatatataagatggggaggtattctctataatgtgggtacgtggcttaccaagaatttgttggcagcagaaccaggactcagggcagatcctttagattacaaccccagtgtccttttcacaaaaccccatacttatcaagggttttagcattaggagtatgcatcgtggaagggtttacatgctcaactaaaaagcttagacttgatttgataagcaatgagtagttatttaacttttttgagtgggaaaaatacgattaggactgtgctttagcartttaatctggctggagtattaaaatgaattagagacctaggtatcttaatcatggtgactacttagaagagcttgggcttcagggatcagagttctaacagactgaactgagatgatctgaaggtcaaataagttaactactttgtccaaagtcagacagctaatcagtggtgcggccgaggttcaaattcaagtctgtctttaatgtccatttctgggattccagctccaggaaagtggatatgtacacagaacacagtgggagagctgctgcacgctgcactttgtaggctgttacagaatagtgtgtatatgcctaatgtgcacctaccccacctctattttttttaagagttgagatcttgctctgttgcccagtggtgtgatcagagcttatcatagcctttggactcatgggctctcatgatcctcctgcctcagcctcctgagtacctgggactacaggcacatgcccagccctaccctaggctagggagggaagtgcctagtatgtgcaaaagaagtgcaataaagctaagtaaaaatcatcagtttttccagacattttacctctgaattagggaagctgttgaatggtgcttgttggtctaagaagtgaatttatctgactttagcctacatatcagcatcagatctaacatccgtgaagttaggcagaattagcactactggtgatttccaagacttgttccccaaaagagcctcaagtgtaaagattttttaaacttgtggttttttctttttataactcttgataatttcttagccatgtatgtccacttttatcagaacaccaaaatttgccttttgcatcctgccagttttactgttccgttgccttgattccttctttttgaattcttgacacttgtcacgtgacctagccccctttttgattcctggccacttacctcctcagaagagcccactttttctccacatcttgtatgagttgctctctttcctgaaaagggcatgactttccagtcactccccagtgatatgcaggggaattcccttattgatgccgtaggtgaacagtgacaagcatcgctggtgtgtgcctcatctgtctttgccgagtgtaacctgtcaactgggtctccttgtagtccagcatcctgtgtgtgctgtgttgacgcaggagcctggcagcacttacccatctcccctcctccactgatgggattcatttcctcctgacatctgtgtgttgcttcccctggatccttattaagtacttgggatagtatatacttctgcattctaactggttctttgatgaggatcaaggcttagatacattctaaacttatccatttatctggggctgaacacacaaatttgggacataactctatacttttgggtgtcgctgctataatctagttctccttattgcagatacccaggaagttttaaagatggtatcaaacttgtctgtttcagaggtacaacgccaaacttgtgatgttcttagttgcctgggatggttgtgctctgagcagttctctaaggacttgataatgaagatattaggattagaggtgacacctgtcattatcctctaggtttagggatatgttataaaattaaatgagaagaggcgatacaaacatccccaggctgctttagaggctacctttcaatgttgagatttcacagcagcaaggagagagaagcagatgctctgactacaatgatgtcttagaactacaagggatctcagagagacactggtaattctatcccccaaatactgggtaggattcaacatacattttcaagtagttggttgtgtatcaaatttgaaatatacatttttttcggttttgtcttctcaacaatgcctactagccacccacatccactcaggtccatccccattgctaaccgtttgtgtgagctgggacacttcttgctgaccttgaagagcagctcatagtgaaggattttttcatctcagctacctcatgactctgccttcggctcccacctccagcctgcttcttttctgtctaggccgtctctaattggaccattcccttgtatcatctcaccatgtttccagctgttagccttgatcagaagagaggctgacattcattcccctgtgctgataagctatggcctactcatgttgacagttagcaaggcagggcaaacccctgtggtgcttctctgttcttttctaacccactctgccctaggaagcaatgggagctggtgtaaagagggccaggctggtgacaggggacccaagttctaaacctgtcctcatatggaaaagaagggagttagattagttgagagctaagttgcttccagtttagtgatatatattgagtttgtactttgtgccaggcacagttacagacactggggagtgaaagcagagtgcctgccctcttgacagtgggtttgtgaatgggaggtaggtggtggaatacagcacttacaaaccgtttcccgaaactgcgatccaaacgtttgtcctcactccctgctttgaacatccatctaatctaacccccttcttttccaaatgaagacaggtttagaacctgagtctcttggcaccagcgtggccctccttccaccagcttctatggcttgctagggacatccatgttccttggagacccactgagctgttctttccgttgcttgtctgtcttcctactacgtgttttaaagggataactacagaggtgtttctatctgatgtagagtatcttcttcctgccctctgttctgtctgactcagatcccacttattgaaattgatagttttatcaaagttctgagaaacttgaggcaagattattttggtggctaatagcatgccctttgtgacctacctatatgaaaaaaaatgttcaaaactgtatctgctggcatgctaggctcaaatgcaggaggagaagaaaagatccatgtttttgaagaaattgtaatgtatacagtgacacaagatgggaatgttagggaaacaaaggggagatgatataactgaaagtgtgtgcttgtgaattttttttttttttttttgagacggagttttgctctgttgcccacgctggagtgcagtggcacgatctcggctcactgcaacctctgcctcctcggttcaagcgatccttctgcctcagcctcccaagtagctgggactacaggcgtgtgccaccatacccagctaatttttttgtattgttttttagtagagacagggtttcaccatgttagccaggatggcctcgaactcctgacctcatgactcaccacctcggcctcccagagtgctgggattacaggcatgagccaccacgcctggtctgtgtgtgcttgtgaattcttaaaggatgtgtgtaagggagtgatctaggggcactgcacccagtgggaactcgggagagtggccagttgtctgcaccactctcgctctaggccataaatgaaagtatgtgccctgttagaattgctttcttcctcctgctttcaggatgtttgcaggtgtcggggagggcagactatttttacactgttcctctgcgtttatccattaaagtaggagagatgctcccagtgaggctcaggcccttgtcakacagagtccctggacggtagcagagcctttccmtggccaatgacttatcagagcttttytccttccagagatgagaagaatcagtccatcatagtcagtggggagtctggagccgggaagacggtatcagccaagtatgccatgcgctatttcgccaccgttggtggctcggccagtgaaaccaacatcgaagagaaggtgctggcatccagtcccatcatggaggtaaagccttctaggtgtcctggccttcctggctggagctcctcccactggcagcaagactgctgggcgtcaagcctgggtggcagccttcacgcctctccctgagagccctctgtccactgtggaggaaaagttaccaagctgcctctaaaaccatggatgttgacctggttgtgtctttaggttcccagtactgggtagagtgtcctcatattctccatgtcccttgactctgctgaatgctgtagtgacagtgactgtccctccccacctcctccacctctgttgctgtccccttccctgctgacatcacgtgtcagaaatcagtgttccaccgaaactcttagaagctttgagggcctgctgggtcagaaaggcaattttcatgggggaygggaaagcctagatagaatattttttaacccacagtatttgggcatcttatctttttagcggggaggtaaagccaaaaggtatgtgataacctagaatctgttgaagctcctcagaaaacagttccctatgatggcgtgaattggccagggcaggccccatctgtgtcttcactcctcagccttcatgataggggctggactagggtgggctcagagcagttgacacaactacaggccagagaagtttgctaaaaactagatcttgctataactaagcatgctttaggatcagaatgctgtctctttttcccccttttctgtatgaaaccttcattttgatggattagaacgaaatggcctcgtagtccctgggacagctttcattccccacctttgaagctaaagctctttgttgttgtcttggttacagttggtaggagcaggcctttctgccagccctgggcagtccgtttgttttatgtcatctagtccatctctaattggacagttcccttctatcatcacacctacaatagtaagaagacattagttgagccgcaagctgccaagatagcatcaggtttccatgcggagccctgagccccatcgactaaggcacaagtcaccatggrgtttggtctttcagatgattttggagcttagggaaacaagaacctgcctggactttccccagtcccctctttctctcttcctttaccaagtgcaggcataaattgagtcttgattcacaggggttcattgattatccaggcaaaatctcctgccttcagagttgcgttactttgaggactttaattctctgctaagtaacaggatacaacgtgttcactatgaatttttgaaaagcaagtttcagtatttgttcttacaagatttgggaaatggtgaatacagttgaaggcatttgtactaaacagacaaaaagaaaaacttttattccattacagtgcttctcaaatttgagggtgcctgagaattgcctgtaaggcttgttaaagcacagattgctctactccactccagagtttctcattcagaaggggtctgggaggggccccccaaatttgcatttctcgcaagttcctaggtgatgctggtgttgcccgtctgggtaccacacttggagaaccactgacctattaaaaagataggatgggctcactggaaaatgtgaaagaatgaaaggaaataatcccctttaatactacagcctgctgataatcatccaacattttggtatattttcttccagcttttttactaactattacagcataagccttgtccccatatcattcaactttttatgaactatcttattggctgcaaacatagattaataaatggctttaccataatttgactccttcttttctgacatttcattggtagcatatttactccagcatttagtctgagccccgaactgaggcatggccacggcccaggtcggaagccgtttgtggactgtggccttggcctccttagaccatgtactatgcctatattgaacagctaagacagccgctccacaattaacctcatgttctacctcaaatgagagtgaaagcaggctctctcctttgactgagtttcaagattctgtccatcttttaggcagtaagatatcagagacatagtgtactacttcttttagaaatagagtagttattctgagcaaaacgaaagacaagaaacctctttgagctccagagactgaacaaagtagttattattagtcatgctggaagtttagtgaaggcagatcaccacattagtaaacatgtgtgagacatggggaaattttttacaattttatcataaaatacacatagcataaagtttaccattttaaccattttaagtgtacagtttagtggcatttggtacattcacgatgtttgtacatccatcactgccatctatttccagaattttttcatcatcccaaacagaaattatttacccattaaacagtaactctccattctcccttcctccagcccctggtaatctctctgaatttgcctattctaggtacccccacacaagtggaatcatatactagtccttttgtgtctggcttatttcactgagcataatgttgtcaaagttcaatcatgttttggcatatattaatattttgctccttttcatgattgaacagtatttcattgcatggtcataccacattttgtttattcttctaccttttgggtattgtgcatagtgctgctgtgaatgtgggtgtgaaagtatctgtttgaattcttgctttggaaatgctttttaaatcacagtggtctgaccttatctaacatttggaatatccattatagcctgagtaggccgctaggctgtgggaacgcagggtgctttgacatggcagagatgaaaagcaacatgcacacacrgacatatgctcaacgtgcttcagttgctaaggtctgaaggaggagtgtgtacatgaaccagcttaatcttacatggtcatgtaaataaatgctacagtggtttgagctcaaaacattaattttctgccktgtgcaaattagtactttggaaattatgtaagtcctgagggtttcttctgtcaaatggagcattttgtcatcccagagactgtcccttgagctgtcattaagtgttatgtttgagagaagtcttggctatgaacatggaaaggaagaattatagccaggaagaaccctgagtagaattagaaagaggcttttgttgccaagcagagaaagaggcttttgcacttcccaagtctgaaaacacgacttttcgtaagtcgactctatctgggaccttgtatcrggaagcccagtcagttttgtggctgctcagagtgttataaccagcacagagcatgtcttaatcaggggacagacagctgattactgattgattgctctgccccatcctagggaaggatggcacctcccaacaaagcaatcggttatggtcacggcgttgtctcattgcgtctgctgcccagcagctgcagacacctcctggggagacctagagttgaaggtctgaggaggcggaaatcccagtggtctatgctaagtggcagttgttggaattaaaggcgacttgaggatggattgagattggctggggtgcactgggatgatttattgtcatcaccagcactctctgaccctgttctgtttaagagcttgtcagcatcccaggagtgatttgttcacaagtctgcactgattaaaagaacattgataatcaagagactgttagaggaggaacagaacccaagtttaggccagagatatcacatcatttcttggggtgactggactttgcaggcagacaactctgagagccacagagaatgcccctattytgggagaaagaaaggagacgagatcatgccattgcactccagcctgggcaacaagagggaaactccatctcaaaaaaaaaaaaaaaaaaaaaaaagaaagaaaggaggctagagtgaagctagcaaaaatgatgatgaagaccagatatgttattttcaggatttgcyttttttttttttttttttttttttttaaagacaggaccttgctttgtcacccaggcggaagtgcaatggcatgaacacgatcactgcagtctcttcctcctgggctccagcgattctcctacctcagccttcagagtagctgggactactagacgtgcaccaccatgaccagctaccttttgtatttttcagtagagacagggtcttgccacattgcccaggctagtctcaaactcctgggctcaagtgatccacccacctaggcctttctaagtgctggcttaccagtgcctggctaagtgttcacgctttttagggcaaagaagaaagccagacactgtwaacccatttttacaagaatctgctcccagtacaccttaccaatcttatctcctgttttctttcatgtatcaacatactttagccacttcaaacttgtttattttgtaacataaccccgtccctttgtccacactatatttatagaatctcttcttctttcccactgtcagaattctgctcactttaagatccacttcaattttccacttcttagagcttttcccatactggggcatggttggttttgctccttatccgtgttttcatactacttgatacatacctctttattgtacaatcaattacattgaaattatttcagtccatttttatttcaccgtgtatttctgtatgcatcgaaaagattgttataccataagtagttggtagcatattccatcaaccagtttgcaacttttcactctacatttttttattaatccatgagctgtgttctagtttattcttttaacagctttatagcatctgattgtgtggatataccacattttatttatgttttccctactggtgaacatctgggttgtatttcttttttattattaaatatagtctgaatggaacattcttgcctacttgaattatgtgagaatttctctaagtaacacctagaagtagaattgctgatttgttaggtgcatgcatgttcagttttactagatatacccgattttccttcagaatggttgttccagtacttttagatctatcaatcactttgcaaagtagcctagtaaagtaaggagggccaatcttttggcagtgatctttagaccttgggcaaagttttcctaagctatcacaaggaatgatctcagatatggtaaaaggtcttattgctatcttagaaagtaagaaattggaaattaaaagtttgaaattgaaacttatctgttgaaacgagcttctcctttagaattttccaccaactggcctttgctgattacatctgtatgacattgtttaacatgtgcctttgtccactttatttcctgtaaaggaatagtaaaatttagaggctgctttagtttctgttttgttttgtttttaacaggaatccttaagatgtggtagttgggcctccattaggaggcacagaaaatctggctttttgtgatgtgagccagcagttgattatgcctagatatattaattaatcagcagttacaaaatgctgatattgtcattctgttacacctcctgcatgtattagctggaataaatctgtgcagagaaacgtccccttaccaactacttaattgccctgagatacagtttacactggaaagtagatgtttaaggctttatttactaggtttcatagtaattagttggttttctagcatcttctgagaggcttctccctgcttttacataaaaagatataagtgaggatgtaatcccagcactttgggagcccgagatgggtgggtcacgaggtcaggagatcgagaccatcctggctaacacggtgaaaccctgtctctacaaaaaaaaaatacaaaaaaaattatccaggcctggtggtgggcgcctgtagttccagctacttgggaggctgaggcaggagaatggcgtgaacctgggagacagagcttgcagtgagccgagatcacaccattgcactctagcctgggagactgagcgagactccatctcaaaaaaaaaaaaaaaaggatataagtgaggattaatatctatctttatcctttgacttgatttggccatttgagccatgagaagttgcccacatgtgtggtggctttctgtctggtagtgagtggtttggaggagacagagtatggaggagtgctgtgacgccgtgtaggtagaatgaacgcagactttggattcaggtatatctgaatttctatcttggggttgccacttcctagcatgtgacctcaagcacgtgacttgacctttctaagcctaagttttcccgtaagtatggtgaaagttagtaatgcctatcttgtagggttcttggcagcattaaatgagattataaggggcccagcccaggacctggcttatgttgaaggtctgggaaatgctttctaccaacattttaggaaatatagcctccttttccatttttcaagtagaaattggctcactgaagtctggcagtctgccatcgtcctgtggggccttaaaggctgagactctttgtggaaggaaagtggttacactgaggcctctgctaagatgacaaggttggtgggtgccaggagcgtgagtccccatcgcctttggttggaggaagctgattacgtaaactcttccagttaggtgactgagagttacatcaggctggccgggctctagccttgtcctgaccttgggcatgttccaagcaccaagatgcccttcagagcaatccaacataccaaggttgtactttctccccctacacttccttccagagttatatactgtgtctgtaacatatagattgctttatacactttaaaccctaaagtagaagtgtatattgtgactccaactggtttttgcaagactttgcagtggcaagttacgtatgaggacaaggagtccaatacttacatttcacaagagaaaaactgaaacccaggttcatttactctttcacttaaatatttttgagtgcttaccatgtactgggtgctacagagtctgtgctgaagcagatgtataatctttgccctcatgaacacagagggttaaccgcatatgggctaaggggaagaagagggaaatgtagggcctggaagagcatatggcaggaggtgctcccctagtctcgggatcagggaaggcttgcttgcctgaagaagcgacatcgatgctgagacctgaaggaagatgagtcgactaggtgcagagagccgtgggaaaagagggaactgcctatgggaagcttgggtgagggcagagagagcatagggctttggagaaagaaaaagggagttaggattgttagaagccgggaccaagggcaagattagaggcagggaagggtcggttcctgccaagcacataagccatgctaaggatttgaaagttgtatctcagagggcagtgtaagccactgaagcgttttatacagggagtataataggtttacattctagaggaatcaccctggcaattgagtggagaattgacagcaggtggaagatgggagtgggaccagggagaccattgagagcccattgaagttgttcaggaaagaggtgacaatgttgcaggctaaggctatggcagtaggatagaaatagggacagtttgacccgtttggaacttggcatcctctatactcggagggtggtgaatggaggccagtcctgggctcagcagcttccctggtgcagagctggacctagatttctgtgagtgggtggttgtataactcagcgcctccctgtactcatctcagtaacaggaacagttgttcagtaacaactcaatggcatgttttcaggagcattagttttaggtcaactttgtgaccttttgcttctcactattctgccagccttgtcaataatagatggctgccgggcatcgtggttttgggatgtcaggcgacactaatagttcttctgcttgtattgggctgggcaggacttgaggggtaggttgggattttggcttttctttcaacttctttgtgcctcaaattttctagaccattgagaagttatagcaggtgtttttcaagtgttttatccacctaaaaatgtaagcatgtgaaagggattaaatattaatgtattctttaccaatgcattggcaacatggtgttttataggaagcaaatcttcacacgataaaattagtcccatatccactcattttaaaaattatcgtctagtgttttgaactgtaaccctgatgctgcagaagaaataccaagagggatgatggcttcctgaggtgggaaggagtgtcaatttgtggcgtattgctaggaaggtattatttgtcagttgggagtgacatttgactgcctgctcatgtagaactgatcaaagtgtattaagtacaggaaggtttgtttgtttttttccagaaagttcagagctagtgggcactggtattgttttagtggctcaagaatgtcacagctaaggtctctgtgattcttcaggccttttcctcatggttccaagataactgctatagctggtaccatcacaggtgcattccaggcaagaaagaaggaagaagagggacagtgggatgcaccttccattgcacctgggtagtcccctttgaagaccccaccaatgaactcgttactctcattggccatcctcaggagtaagaggctggaaaaagaagagtttcaagtttttgttttattctttagctcagttcattgtcatcccaagaacagagggtttctgtaagtaaggaagagaaaggggacacatgctgccacaaacatacaatcctgaaatcaagaaagccctctttttttttcatacctttgtctgtctggtctgtgcaggccattggaaatgccaagaccacccgcaatgacaacagcagccgttttggcaagtacatccagattggctttgacaaaaggtaccacatcatcggggccaacatgaggacttacctcttggagaagtccagagtggtcttccaggtgagygggaggatttgcgcccttttgtgtatttctcatggacaattaccttacttctgctccctgccccactccctggacccaaagagaatctctcttgtgagcctggaattgaatgtagttgttcttttggttcttatcttttatcagtaagtgttcattcagatggtatagggattagatctcaaaaacctttatacagtactgttttcagattcaatcaacaaacgttgaatgcctmttatgtgttagctctgtcctaggcaccaaagatacagtaaaggacaagacagaacttttccttatggattttaaagtcttatcaggggaatgtcataaatacggagtctgggttttaggtttcctgagaacttccttatttagtaggtttaaaaaatagattatacttggctacctacttagttttcttttcaaataagtggatgtcccattttttaaaaaaaattatactttaagttctgggatacatgtacagaacgtgcaggtttgttacataggtatacacatgccatggtggtttgctgcacccatcacctcatcatctacattaggtatttctcctaatgctatccctcccctagccttccacccactgacaggccccggtgtttgatgttcccctccctgtgtccatgtgttctcattgttcaattcccagatgtcccacttttcacctgacttgattcttcactgttcttcgcttacctttagtttcctcctgccagctactctttgcctctttgtaatccttctcctcctccatcctgactttagtgggcttggtgcaactcacaacgccgatagaagtcctcctccagctccctttaccctcccatcactgaaccaagatgatggttcaggtcctggtttgagtctgtggcagattcttgccttgggttaaatggcttcctggtcattgagctttagctgcctttaaggagacctcagaattgcctcagctgtttgtttcttggtgacatctccatgctgatgatagcaaacatctaatgaattttttaaccagctccccatgcttttgcctgcattttatatgcacctcacaggttggcttgataatccccccatcctgctttacaccacagccagggaagcagcttgctgggttgggtgtgggtctgatgtcttgctcatggctctttcctggacacccctggagcttccctcttccttagctctcttcgctcaggcctcctgaatccccacccccacacccaccccaccggtgtaaggccagtccagctgcaggtgttccccagacatcctgcctcacttgtgggcctttcctgtctgcccagcctgacctgatgggcaagcacagcttccacttatctctgagcctcccagaggagaacgggagctcacagaagggtactgacaatccatgggacatcagccaagcagcacagaagactgaataagtatttgttgattgactgactcaccatttgtgaagagcaatgatgtcctatatagaaggaaaaaagaaaatacatacatgcttttgcataattcaagacatataaatcctcaggttggaagaagtccccataagagtgaatagaaagtcggaaagtgggaattgaaggtggcagaggtgtggaggaaaacactgggaagagtggggggctcagcctccaccacctggagcaccctgggattacagtggcagagggaacratsttagaggtcactgccctaaaactgcttcacttcttcctcctccaggcagatgatgagaggaattaccacatcttttaccagctctgtgctgctgccggtcttccagaatttaaagagcttgcactaagtaagtcaacaggtgcatgcctatcctctggggtgggctactgctccagcgggtgcacagctgggggctctgctcaaagccctccgtcatgggttcttgtctcgrctctgcctcttatgtggccataacccctaggcctctctaaatttcactgctcaattagtaaaagagggttaattgtatgcagtccacctggcacaggaagtgtatgagaggataagaggcaggggtggaaaagtgttttgcatggcatggaagtcttttcatgctttattattctgaaagatatgtttgcactttaagcatcataggaaatgtgtcccaaacctaagaatctagagataaaagtaatatacatcatataatcataaccagcatgttttaactcatagtttaggattgaggcaaagagaaaggggtgaggataaagcagagaataaagcaggggtggctctagagccatatggatgcagtatggcatggccacagaggataagagggggctctggcatgtgagactctggactgccaggccatctgatctctcgtggactggcatggaagcttctagcacatcctcactggagggagagagatggagcaacccaaactgcctctccacaaaagctgaggggataaggcactttgtcatcatccccatcagatgagcaccaccctttgtttccactcctgctgcttcctgaggggtgttagcaagtttcatttgctttgaggctattgatgtggagccagtggagtagtgagcaggctttagttcttgactccataccacagagcagctctccttgggtctggagcctttggcccttctctgtgtgggtccttatggggtaatgactgatttttgctgctgagtcttcaggcacatatgtgtaaagagggcaagccttgagcccagcagcgtcttggtgtctgccacacttcctgccatgcttcctgtccctgtcctgctgtccgtgttttgggggcatgtggggaggtccaatactagcagatggtatgaagatccgggtgtctaaacagagtagttggtctttgtgcagctgtgcaagaaacagacatctgaggcttggctgttcctgatccaaatcctggccatcctaagagtccagcaccagacccatctgtgctcccagtagctgaaatccatcaagtggtttcagcgcaagtctgccctcataacacttgcttatgaatccctgtatcttcaatgcttgtaccatgcaacttagcaataattcttgcgtttgttcatcaaactctattcaggccatgttaggccccagggatcctgcattgagcaaaatagttgtgggtcctaccctgcttagcttgtcaattatgatgcagagtgctaagggctgtgctgaaggaagcagagctgaggagggctgggaggctccccccaggaagtaatatttaaattgggaccccagggagaaaactctggctgatgtccattgttagttatgtcctgttctccagctggtcagtgcttgcaagtctgattttccccggaacacgatgacatgataaaatccttgaggacaaggagtgtgtgttccctgctaagcagaacaggggctgagcactctttgcacactgtcctgagctggagcctgtggctctgagggtgcctgtcactctcaagcagccaggtatgcctccacattaggggccactgccatcctcctctttccttcccagagcagaacataggcctagcagggcttttcggggccaacttgcaggaggtgaaatttttttccctcaggtcagttttatagaaaataaacaaatattggcaagacccatctggatgatttggatcagttgtcccagttgtaattctaaggtaatggggaagaaatcctcctaaatttctttttcagttacatgagtcatattgaggttaaacatgatttccccttattccctgtctctgcaaggtacatgggccccaggctgcagcacttgaaaactacccaatttgatcagtatttttttcccactctttcaccttcatgtgccctctgagaatattttggagtgaaacaagagcctttgacgagcgcttgtgctctggtgtcaggctgtcctcggcctcatgggtggattggctgagggccctgaagcttggcatttaggtccactaataaccctagtcgagtagctgaaaacagcaaatacatggactagccaagggctctaagtgaatatttggacctgcttcatatccttcttcctcctcttcacccaaaacacgcaattcaaatgcacacaagtctctgcaagaccccttggcttggcgtaagttttgtgcatttgtctgagaatggagggtgcagatttgcatccagttgtccacactcttctgccccattkttgggccattgcatttaaaatgacctcaagaggagattttttttttaaagtccaatgaataatttgttaaggtgtgaataaatgatggtaaaaaccatacaggccaaggtcaataccctagaataatctcctggcccttttgtgaagtagctgcactctaccttccactcacagcttatttcctccccatctctgccttccagatacaccaatctctggtggtacatccagttgtaatgggcccattttcccttaaatacagcctttaggggataagaagtaaattccttttcttctttttcatttccgtggttgtatggatagttttataaacaacctctctggccttgcataggtcagagcatagcctccccaggtgatgtgcaagtccatgaccatggccttggtggtccggtgctctaatcactgggttcatgttctcctctgtgttcttttgactgcctgatccaatctctgcctgttgaactagttaataggaggtttgtggtacatttctccttgggaattctttgtaaagagagagacctaaactggaggatgagagaagttgctttgggatgggatagtcagtgttcagctttatgggcctgaaaggagggctgcgatccaggaaagccaagcaggtgggggaagactgagtcctatttggatgtaccttactaagagggtccagagagtgataygacggagttgatggcagaccttaacgcatatggaaagatgatcattttgattggtttcagatcattcagtagaaaatgctgtaactgacccaggtggcccctgcagtgacaagcctcagtctgaggaagttgcccagctgggcctgagttggggaactgggcctgagtttgggaactgggatctcggaaggcggggtgtctatctgattcgtagcaacatcaggcagtaggaccttggctattgacaatgaaaggtcttcgaaagatgctgaaaatgccttccctctaatatgaaagtctagtctcctcctttggagtctcaggtgactctttctgatgtgtttggctgacacttgatgatgagttagtttgtatttgtggcaaaatcatgagatgccatagataaattgtcgtttttctacaatagggtaatcaagtaatggaatcccaggcctgaccaaaccctgggtgaccctgggcaccccttaaaccccatgttactcagtttgcttttctgaaaaatgggagtaaataatatagacagtcttctttggtggacactgtaaaaataatcaaatgagatactttgaaaggtgagtgtaaagggaaaaaaattggtacttttattaagcctttgaaactgttgtattgctctgtgccggtgcttgctgagtgattaggtaagaaagagctaaaatgctgtcttctacaaagatctgatgtggttttcctcattaaaatgtgcttctgccaaggctgtgagtgaccacagggctggagtccttcctctctcagttcaagtgccttggccactggtcctcagaatttgttactcctccaggaaaccttcactcatagagtacaactgatgttctcattatttgtgcctgtgggcagggtcacctggtggttatagttcaggttgtgtagtcagactggggtctagggctgagttctgtctctccttgcctggcctgtccatgtatgcataatagacttggaggaatgggcaaagctcagtatggcttggagcataggatgcaaggtgggaaatggggggaggtgaggaaggagaggtaggcagagaccactgaaggcgtggacagagggaagagctgatgcatgataataaggaaactggtgtatctggaacatagagatggggaaggaataagccatgagtctggagggtatgtggtggccacttcacaaaagggccaggggctgttctagggtattgaccttggctttgtgagcagtgggacctctcaaagggctttttaagcagagtgggtggtatgatcagacatactagcattttcgaggtggatttgaagggacgggtgcagaagcagagagattggaatagtgtctttttcaacagttctgacaatggagctgaagggcaatggcaatcaggatggagaaaggagagagacttcagaaattcttgagatcaaattgcaaggacaggtgttgaaggagcactgggagttgcagtgaagctgcatctaagcacctttagctgatgtgtttcagccctgcatgctcaggtccagggaaaagaacttagggttttcagggaagagggaacttggccagtgtctccttttgacattctatcaaaaccaaacgttatacacttagagcatgaagtgccaggcaggatagtaccaggcaggatcaccatacaagatactatattttgtgaaagatttaatcagtttttaagggtaacttcgattacatgcaattgttgccttaaatgctcacttttaagccctgcttcctcctaagcactaattctgccgtcctctttgtagggcagatactacccagggcttgttgcatttgtgtcctcttctaagcttggctctgaattttaagacaccacctgggcccttccttaccagctgtcccctaggctgttaccagaggcctgactgaagaagaattaagctgggggatgacagcaaacatgtaagggtatcaacctgcatttgtgcatgtgcccagagagttcaggtgtgcccaactttgtaaaacaagtgaacaaaaaaactgtcacctcgggcacatcactgttcctcatttgtcaaatgagcttgtcggactgagattatgtaagtcatagaagtctggttctagggtggggatacattttacttgtatcagatcttttcaaaaacaaatctgtgatgaatcctattaaactgaattgtctgtgacgtatatgccttttgtgttaacatatgtttcccgtgccagttttacataaatacagcagcacatttctgtcagtgtcgtataattttcttgtactattcagttttctctcccatttgccgttgtggataaagactattttaaagagtttcacatccagctgggcctaaaatttagtctgggatagcatgctaacggagtagaattttcatgggtcacgatctgtgggatgaagtgtcctccagtgcctcatgccttatttcctcgcctcccacagcaagtgcagaggactttttctatacatcacagggaggagacacttccatcgagggtgtkgacgatgctgaggactttgagaakactcgacaagccttcacactcctcggtaaggagcttcttagttggggaagcaggccccgagggctgatggcacggagggtagaatgcaaggcgatgtcccactgtgcttgccagcaacctgcaggagctaatgggagatgccctcttgcccctggtgaatgtcatctcttactctcttacccatcccaaccctcaggctctagaacttaaaatttggagcttcattgccttttaaaaaataaggttatgagagtccctctcccaggcactgtgcagtgaccctttccactcgtgcaggctgttggaaccaacggaggcaaagcaagtgtagccacgtcttctcgtgctgtggtctgggctcaagtgtgctctagcaggaagaacacaatgttgcgcacacccagtgcacctgtgcaccacagcatgaaatcagagttggaagcaggctgtgaaggtctggcagctgcatcacacatacagcgttaattctgtcagctctgtttccatatagagctttagcgttggaatccttcaaacaagaagttctctgtccttcaggggcataaggggacagtatgactggaggaaattgccctgcttccctgccacttttgggggagaagcggtaaagtagaaggtaagcctttctcagttgggaaattgaagtgttaaattcctgggacctgcatccagaaaaaggaaagctcgagaagtcagcctgaaaccccaagtggcgcaagatggtgcttgtgtcttccccagccccttctctgaaagagaacatttggcttctgagccatgtgactaacccagagcagcatgttaggttctttggaggtcagggaagttgtagccaatgtccaaataaaacatggtcaaacgggacacaccttaacctctctatggggaggcaaccagacccttatttgccacgctcccagagccagtcagttctctgggaaactggtacatagttcatgggtacaaaagacaaaccctatctatcagtcaggagacacaaaccacactggttattccaaaatagaaaaattaatataaacaattgttaactacagcagtagcaggtgattgactacaaaagggataaatgaggactttatagagggtccagaagtagcaggtacaaaagaacatctgctattcctggcaggggccgggatggggtggtgggggaagaacagccaataaaggtaagagaggcctccatcctagctgagctttagttcacttctaagaggatgtgatgaagaaacttgcccagaggatgcaggccagagctgttttgtacaagcaggctgcaggtgccccaaggtgtagggggccagaactgctcagaagccactgctgatggggagacaggtctgagggcagagctggagctcatctggaggtttctgggctccctgataaatcatgataactatggaggaccagaaccagaaagggaattgtcttcatgttctgttgccttgcaaatcgccggaataccctctattgagcaagcttgacattctaccagtwggcaaaggagaaatgtttacagggcccagcttcagtttgataaagcagggcaaaggggatgctttgaagctgagagataagttgataactggcatccctgacttcctcagcactacatgcctatcctagtctccagagttgggcaggtttggagcagacttgacagtgtgcaggatacattcttctctgaatttatcagagaaaggagaagatctctggcagctgcccttgtagtgctgatgtgggcagtgggcacaagctgatataaggagaggattgctccctccaaggctctaaggacactggatactttaatgctcaaagcaaattgcttttgtaaaactaattattgtaataagactttcttctctattctttaataaacatgtcccttttttaattgcaggggttagcaaacttaaaggacaaaatagtaaatttttttagttttgtgggccatacagtttgttgcaaagcattcaactctgctgttttgtgaaagtagcaatagacagaacgtaacagagtgggcatgactgtgttccgatagaacttagttatgaaaacaggctgtgggccatagtttgccaacccctgttttactccttaggtttgtttgattgatttttgtttttagattttttgcttcccatagcgtgaggtaccacttattcaaagaatcccacagcaggaaaggatgttctcatcaatgtagtgcgaggatcctaactattgttaggattcagtattcattctgtgtctaccacttaaattcctaccatgacagggtggttcggtctttggaaattgacagagcattggttctcaagagtaaaggaagtaggccaggtacagtggctcatgcctgtaatcccaacaccttgggaggctgaagcaggaggattgcttgaacccaggagttctgggcaacacgggagaccctgtctctacaaaaaataaaacaaattagctggccatgttggcacacacctgtcccagctactcaagaggctgaagtgggaggattgcttgagcccaggagtttgaggctgcagtgactgtgccamtggactccagcctgagcaacagagcaagaccctctctcaaaaaaatagataaacgaagtagaaaagctactgtctagggagtatatccttcttgttccgtgatggtaccagcacccagctcctgtctagcactttcaatgggacttgacttaagagcaagatactctaagctcagacaaaaaaccccagtgttttacctcctacaagggtgcataagtgcctagcttcctgtcttgtcctgaataccagcctctggctttaatctgtcttcctttcaccaggtgtattcagttatgctgaaccaagatggacgcttaaattctttggtgttttttgggggggatttttaagctaataccacgtattcaaataatgcatatgttttgatagctgcaaatacttgcagcctgtgtagtagccagcgatccggtcattctaccattcaggtttctgagcacctgctatgttccaggcagtgttcaaggccctgggaatctaatgacaagcaagaacagggattcattatattatttactttgttattctttactttgtatgttttgaaattttacataataaaatcaaaaaagtaaatctatgatgcttacatggtagtggccatctaacataaaagcctagagttaatgttgcttgggttgtccactttgtagattatctggggaaattttttaatcctagcatggcacatctgtgcctcccatttttacaggtgttactgttttttagcctgaataaaatattgccttaaaaattaactgcagctgggaggaatggggagagcagctgtatttcttaaactaagtggaaggttcactggtattcattctattgttctgtagtcttttaaaaatgagtctgaatcattctgtaaaaacgccaatgccttgcaagctaaatacaaattaagagattatccatgcctttgatgattcgtataggtaaataacaaatctgacaacacgtgattgctgccacagtggttctgggatcagtgtgcctgcctatgacagtgcatatagtgtggcgaacagctgctccatctggggatggccaggggccagctggccatccagccccagaacagcaatcccaagagaagtttctccttttcttccctcattggcactggggatgtgtgtcacagatgtttacaggatattatgttggagaaaaaatgattgcagatacatgaccattcttattaaactcataaaaacatccataaagtgtttggttgaaatgaagcccaaaatgagcctgcaggattgctgcctctgctttgctctttgagaagttaaaatggcagcttgacccatctgatttggtcaggacgatcatagtgaagatattttctttttagtccaaggagcccctttgccctctgagctgttactgtgagtggtaattacttggtgaggagcctggatcattttaggagtcatcgggtcagaaagaaaaatcaaaccttattaaaaaaaaaaatgtccttaaaaggggtaaaatgtcctttctgtccgaccatggatactgagtgtcatccattcatttttcttttccaggagtgaaagagtcccatcagatgagcatttttaagataattgcttctatcttgcaccttggaagtgtggcgattcaggctgagcgtgatggtgattcctgtagtatatcagtaagttgcacaccaacaccggagataaaatgaacacaatttaccctgttctttgatatgactgaaatgtgtctttccagttagaggacactcataggttatttattcttaacagtaatggtttctgttcacttgctgataattttttaaaagagccaaccctttaaaaatcagctgccatcaagtttctgttgccraggacagggaatgtagtggctatttgataaattctttttgttgggttgatttcccaagtaccctgaagtacacagaattctacttgttgtcaatcaattgagtactttctgagtgccagactgaggtccccactgcaaggagatgaaagggcacagggcactgtacctggtgatgcttcaaaggggcttatagtctaattgggtggacaagacaggtggcaacccttgccaagattctgacagcacaaggcaggctgttaagtgagacacacatgtgaaagtactgcaagctgtcaagtgctccgtgaaggctcataatgaaggttattttcctgatgcccaatgtagtactgatatgtggtaggtaaatgtctaagtggatggacgggtgatggagtaagcaccagggaagtggcacccacagcaattgctgtgccttctggaatttaatggtgttgggaaaagctaaagctggtattctaaccttggataggtgaatctgcaactgtttattctatacctcttatgcccatttatggccaggttctggggaggtacaaagtatgattcttgcttccagggacttggaatttaaataaccagacactggaaaaatacaaaagacaacactacctgagggcaygtgtccatgctgctcacaagctaatgcttattcaattgagtggacgtaaattaacctccttctgtttgtctagagttgggggttatgagaagttcaaactggccctgtcttcagggagaggaagacctgaactgtagctgggattcagtagagctcattgtgtatcatccatggatggatacacaatctgtggggaatgatctagggtttgagagggcccctgggcctgtctggcctgctgccatccctggcatggactctgcagcctcgtgagagccttgaagctcccctgtcgggcccagtggaaaaggaggaggtgttggtgctggtagcgttaggtgccctggagctgttttggacatctgctgcttatatacctgtgtgggtgctcaccttagggggaaggagggcatggtacagtggagttggcagcagtgatgccatgagaaggactgtcatgttcagaggaggacctgtggcccagggggtggtggaggaacctccagtgcaggacaaaccttccygtaatctgagtcttcagggccagtgatgtattgtcccagtgtctttcccctgataagaaaggcatagagcatctgtgcctccccatgcatacagctcagtcaatgtcctgtggttcctcagggcagctgtactctgtgtcagggacaggtgagatgaggaacacctgcagtgaccaaggcctggctgaggctggtaagaggcaggaaaggtgacagatgtgctctgtggtctgtggacctccagcccgcccaacaccctgctcctccccaggcccttcacaggtcacttcttctttcatgggttcttacctctcctctgtggggctgagcattttgtgtgtgtgtgtgtgtgtgtgtgtgtgtgtgtgtgtgtattacttgctgcctacctttctcctttgtgacactccaaactctgaaagagtagggtcagttctcgctctttagtctatcaccagcatctattgtggtgctcagcactcaccaggtacccaagaagtagatgggtggatgactgaggctctccaggcctcaggggtggcacacaggagagtaagagtggatgggcaattctgagatcttagtgaggctgatggttagcatgagaaccagggctggggagtccgtggrcacctacctgcattggggggcgagaccagcaaaattaaggcttaagcctgtaagtgaagtgtctctgatcttatagttgaccctccacacccagcctccggagaacgttcaggtgagaagggaagtgagtgtttattaggactgtatctgttgggctcactgttctccctctagtacccactgagtgtttgtgtggagatagtatgagggtgggaacatcagggcctcttagggaggcatggatggaggatgcaggtggtaaagggggcaggagggaggaggcctgagaggttgaggtttggatgctacctggtgtggcagccctttctctgctaggcggcaggaagttccagaaggcatttgagtgcaggtttgtggtctaggctggtcttccattgttctgcaatcagagctgtacagagagctagtggacagcaaggactctaagtcgagatggccaaggttcatatcctgattcttcttgctggatgtgtgacttacggcaagtgtgctaacctctctgtttcctcttcwgtaaagtgtggataaccacctgcctcagggctggagtgaagatcccagaaagccctgtgtggaaaggttttagcacagagctcgtggttgagagagtctttgtctaatatcagccttgttatagcctgagtggaccttaagagcatccctcttgctgtacaggggaggaaaaaataaggcccagagaggggaacctctttctctgaggttagaatgacaatggcaaaggtgggacagggcccaggcagtgttcagtccacttcactcctgccagcctggcttcctcggctggactacaagtccttggggaggagactgccctctgcttgcctggtgagccccattggtgccctcacagtgccaggcacagaatgtgtgcttgagaaatgcatcgttaatagttgctaccgagagccccactgattgtggtttattcctcgggcacataggatggagcttctattggaaaggctgtctttccatacgcagtgtgccttctgctcagtagtttttatttttaattaaagcatgagaatgtgctccatgrctgccagggttgccttggagatgcaacagcattcaatttgtttcttgaatttarcaatatgggcccataaaactgatctgctacttattatattggctatttttaatggatttagcatcatttaattttgcctaaatgtaattgtacratgttaaatcagtttcagtcagcaccttcaatcaacagtcggaagagggtgagaaaatcaagccccgccccactgtggtggttaaaagccggtccccagggtggtttctcagacaagtctctaacttgtgctttctccactgcactcacagcgcgaggccttargcaggggagggtgcccgtgggcatgtcttgggcagtcatggtagctgctggcaggccacttaaatgtcagggaatccatctgcagtgccgtgcctagcaattaagaatttcttggaaataggtcagatgaacaaattggacgcttgccacctctgaacttgttgcctgccaagcggtccccaggcacttaactctactacatatggctttatgtttaggggagtcggggagcrggggagacaggttggcttcagagaaaaaggatcttggccaggagaagtagccatggaaactctctgctgagtgtgaaaagatgggggcttctccacacccacccggcccaaaccaagctgattgtcctgcagggctggggttaggagctctgggccagaaggcaggaggcctcactcagcttcatctgaatagtaagggacatcggattagaatgcaatttcttaagaacataagcattctttggtcaaatacattccaaaaatgcttcttaaaatatctatctcttggtgctacatggtgtattaaaccagttcagctgtgtttaacctggtcctatcctctccttctgttaagtaaagccaactaatgttctttgcaactactgttccataaaccatacattggaaaaacactggccttagtgattttggattctattattctggcgttctattattttataactgttttgggtagatggattttaaatatatgtaggaggaaaaaattgcctggggatatggtgttaagggagaaataatacagttatctgtgttaattttcattaagccctcatttaaatcctacaagtcagcctcatcagaaaatgagtcccacaagcaattgagggtcattaggagatggcacatcatgttctgaaggattccctttcagcctcagcgttaataagctttccagcaggcttgagcctgggctaccagctttcccaggtggattcagttgagggaatgaaaaacaggtgagagaatgaataacaacgatgagcaggttttctcagagtgccccaagtgggctgcaaggattatccaaggaatttgtacmttttggtgaaagaagacaagaccctgtgggaaatgtggctttccagtgactcaaatgtcaggtgatgtgattggtatttgggtaaatgagggtcaagactcacacatagtcagtagaggcagctggggtaggcaggagatacatcgggcaggaccgtggtagaagccttgtgctgggggtggggcgggggcctggttgagtagttgtacctctctggggctcagctcagctttttgcctgtaggaaaagaggcctaaactggaggaattccagtttctttccagctctgagcatgtgtgatattatcagtggaagtgttccagatgatcttcccaggtcaagatgtggtccaggggtttgccatgtatcttagctttccacgctgaggaactttgtttacatacttaaaacgcttgcttcttggggaaaaaaaagttcagtttctatgattttagcatcaatgaggctaagaagaaagcgagcctgcttggaagcataggacaatgcagggtcagtgctgggagtgacatcgtctattgcgtttcagcctctcacccagcacatctgaaccactcactggtatcatatacaatttcagaaactcttcaaggtgattctcacttaagctacccacccagaagagaatcattgatctggcccatcatgttattttacagagtagggaactgacttctaagggaggaacatggctagtgccttcgaagggcccatccaccttaggagcctggggcttgtttctgagcatacagctggttagatgggtcgggtcaaaggcaatgcctgtaagggaggaattctaagagagaggaagagaattgctttctgggctgtgggtcaagcactgcatgcatacctcagcagatgcaaactgcatttggtgtgaatgtgttcgttactccgaatggattgcatggtcataagctctcaattctctttctgctcccttcactccaggacctgcctcttaccagttactcagcagcagcctggcatggagggaggggacaagaaagatggagaatgttttggtttttaaagtcctataatttggtcattagcaggtggaatgaccagtctgagcattgctctcttatgggctctgtcatctccacttagcagtgtgtgtgtgtgtgtgtgtgtgtgtgtgtgtgtgtgtgtgtgtctgtgtgtgtgtgtgtgtgtgagagagactgctgggctggcagcagggcatgtgctgggattctggagggctgggaggccttgagtttggcttgttttycctctgggcaggagggtggaagacattggtggggggcggcttgtctcccacactcctcctgaacctatctcccccatctcccacagccccaggatgtatacctaagcaacttctgccgactgctaggggtggagcacagtcagatggagcactggctgtgtcatcgcaagctggtcaccacctyggagacctacgtcaagaccatgtccctgcagcaggtgatcaatgcgcgcaacgccctggcgaagcacatctatgcccagttgttcggctggattgtggagcacatcaacaaggccctgcacacctccctcaagcagcactccttcatcggggtcctggacatctatgggtaggcctgccgcctgtctcrctctatctgctacctgggagtggcttcctgctcatactttrcagccagcaggggcattggagakcttcctggtggttctcaacttagggcagtttaaaatgtgtggggccatttttagttgattagttgacacaatgatggggcctgaggccagggaggcttagtggtctataatgtaagggaacagtccccaagcaagaatggacctgtcaaaacaccaggagtttcccaatgagaaaccctgtaagcgtcagtttttacacctgagaaagtgaggccaagagagggaaatgacctgcccaatgtgattttgcaagttactgtgagaaatggaacttaaattcaagttctgtatctcagtaatgttttatttcaatctascatttgacctcattgactgtaacagtcaaggtggctattttagtaccataattttgtccagggctgtgcagatttgtgttgtgtgtggtcattcctgaggtttctcttcctttcagaattccagcctgattgaaaggactgttatttataactttatttttggcagggagagccaccgtggtgtggtgaaagtgtacttgcctagccatcgggagactgtcaccaaccagctgagtgaatctccacagatagcagaccctctctggtctttcatttcatagcttcaaatgaggttttgagccacagtctccctgaggttctttctaggtccttgtttgaagttaacacgaactgggttgcaacctaccttgcacttcttttctgaccaatgtcctgtcctctttaagctaacaatagactaaatcctcctggatctttaaattatagaagtcatggcatcttaaaatagaaattcagatccatagaagtgaagcgtcgtaagaacagtgacactctagtgcgaacaactgcttagcaggctagaactcacccggtactcaccttatgatgaggttggaataaaggccagtcccctgtagaagtggccacttccccacgtggcatgcggagacaggctctcctgattacatctctgatgctgttgctcatccctgggtttcaaattgaactatgttgcatgctatggagaaagaagacaatctttgtgatttctgacatcacaaaggcctcaggaagatgctgaaggagttgtctcatgcacgagttaagtgacataagaggcatcagaagaaattgtggaagggtctatttgagggtttggatgcttcgtgctgtacaagtttcaaggctggagaggacacgcttgcacagttgggcaagctttatgtgggagctaagatttgaactggatcatatgaacaggggaagaatatggaaagtgagggaggcatctttgggaacaggagtgcaaccaagatatgaggaaggagcagagtgtgaaggcaaacctccttgctgataaggagcacacagtggagaatcaccgagagtgggaggtgagaagaggcatcctccccaggccttcagttgcatgaccccaggcaggccccttctcctctggtccatcgagtgcttgccttgtgctcagcccttgtagttgctcttgggagagcatagaacagtgtgctctctgggaacttccagtctcattgtcaatcattaattatgtgttgatctctctactttgagtattttcaggtaattggatatcccaaaatactgacctttcggtattaccttccaagtaagacctggggaaacccaagctgacccaattcccttaatccacttgtagaaggatataattttactgaggttttgatttaggaagattaacatgcagacttgtcaatagcatgtaaaaattttatgatttccttactactgctacataaaataccatgcctcagttctgttgtatttctatatcatcttaacagtgccttgaatttaaagagtctgctttctccttccctgtgatcttccgctgggttttttgctgttcttaggaggcctccgtgagctgggctcgtggggctgctgagtccacagatgtcagcccggtttgtgcaagctgggattttgtgtttatatttgccatttaatttttgtaattgtttgttttctctaacatcctgtgactgcctaaaggggagaaatagatcgcaaggatggcttgtctggtttgaaaacaatagttttccatggatggggtggcaacctggaggacttggtctcctgttcctagtgccagctcctcacctgtgtctccttcatctcagagtggcttccgggctcctttgagactatctgacagctcttccatgagggcagggtcccgatacagggccatcagcataaggccattcttgggaattttcctaccctttgtgctttcttccgggcatgctatgttgtttttttcttaatcttcattctttctcagaaaccaattcactttttttgttwtaaagttgtcatattttaaaagtgactcttcttcttgagacaaataagtcccatgcacagttactcctctgtagctcaatgcagtgctgagttcacactctctctgagttaaggataacaagttagatacaagggaattcagagtgaacaagctagctgtgtgcctgggccattggttgccaagaaagcacttacatacatgccctaaatatggaagtgcatgctactcaatggtctgattcaccaagaaattttacaaatgtggactggcccaggctgtctttctggtgagagggtatgtaatgaactcttaggagaactcttaggagattaaaatcaacaaattaacggaagagcaggtggcttgagtctggaggtactttctaatctatcaggtcagtgatatcatttcttaatctgggagaaaacaacacagaaccctgggtggaaacttgggatagcatgtgtgagccgtttactgtcatctgcccctttccacttacagtgtcttatctgccttatttcctttggacttcacataccttccagaaacccaccaaacctgccttttttgttttttaatgtggtcatttcttggttacctggaagtgggcatcacactcagccccacttctcgccctctctactcacctccttcccagttcaaactcattccagtcattaggctttattctattcatgactatgggaagtgattctaaggagtttttcatcctctgtggcataagaaaacccaagcgttgtttaktttttgagttttctattcatatccctggccatcaaaccctggaggagaagaccatctgtccattgtctcactccttcttagtgggggtgtggggatgcctgagtacccatagaggatgccctggggctgacctgatgtctttgattttctcacttctccttgtctcttttgagcaagagtggcaaaagtggagtccagagagaacagaaagaatactgggatgagtttctgaatacagccagccacatccgggaagtggaaaagaacgagacattgcctccctctcaggttggaaatgggcaaagctaggaaacgagggtggaactgctgcttcttccccttgaccccaccagtggccactgatttcttccactgggataactgtccccggatgagctgcagtgcctatctagggcattcctggcccgccagtgaagctcattcatgaaccgaaataattctgtaccaaacatgagccactccactttttcctataaatgtgttaaatgttaccacagaactcacagccagagtgaatacacactcacttctttctataagcaagcagtacacacgccagcatcgtatacacacatttctccccatcactgtgttctgactcatagttagcttgtagaggagaaaggctgtgggcttctaaacaaattagcatgggccacagctgcttccaccatgactgtggtgagtgctctgctcagaggcccttccccaaggcttttctgaatggttccagacccccagtgtctggtggaagcttccctacatcttgctcctctgtcccagctccacaaaaagtgcaaagcaagcagtactcagaacaatttagtcaccccaagctgagctcttcaccttaaccaaggatctgtgaagtcgccttcagggtatttttgaccaggcagggtatggaaattaataggggagatcctggcagcttttggctgggattccctttccaggttgcattaacctgcatttgcctctctaggcctgattaattgcagtctgtaatcctttatacctctcctccccttgagtctctaatcctttgttcctatcctctctttgaggcaacaagaaataaacggcttcaatttgggaaaaatacacatttacttgtctttgatttcagccttcaagatgccaaggtagcagagggctttggctatggccagcccattcttgcggaggacagttggcctgggagcaacacaggctgtaacagattcatgtgttctgctgaggaacagctggggagagaatggggtagaaggtggggaagttttgaccccaggaagcaggacataggatttcctgggattttatatcctcatcagtcctctgttactttcttgtggtacttcctaataataaattagcatccaactctattcggtgctctttaatggtatgtttaaaaatgcctttaaggccgggcgcggtggctcatgcctataatcccagcactgtgttgttaacggtggagggtgtccaggttcttggcgtcttgaacaaagaattggacaaaacgcacaaagcaaggaaggaatgaagggatttattgaaaatgaaagtacacgccacagtgtgggagcaggcggaatgtgttttacatattcatttacaagttgttacatattctggttattaatcttttatcagaaatatgatttgcaaatatttcctcacgttctgtaggttgactacaatgatatattttaagtaaacttcttagacccactgttcacctttgtttggtggggaaaaaatattcttttgctttagttttcttggtctcgctctccaaaataaacataaataacctcaaagctgcaataattatttggaggctacccatctcttctctagccagtatcgaaaggtttcacagaaaatggagggggagaaatcaggaattgcattaacccttcagcctgtgacagtgtctcagccctggacagcccagaagatccctggacatgccttcttcagggaggacatgcatggctggccacagtgttctcaaaccttgcagatcatcggaagctgttggcttcaccctggagtctcccagcctcctaggaaagcctcatagctcaagagggctctaaagccaggctccaccttcccgaattgttctgaggtggccctttggagtgtgcctggagcctgacaccactgtgtgcttccaaggctcagatgaagttccatgttctctctgtccatgccagtactcccacactatgtggcagtccaggtctcactaacgcaggcctctatagcaactgtttcagtactgagtgagtggttaagttaaatattaaaagctaaaaaagtcagtgccctcatacaaaggctggaatgtaacaagagcccaccaagagtcttgcctaggcccttcctgggccttaaagcatgacaaaataaggaatgaattcttaacaggacccgtttaagattaaacaagttttattgtgggtctgaagaaactccccaggcctctagaaacaagtttattggggggcctgaaggaactccccaaacctccgtgatttagcaggagacaagataagggtaatcaccccagcacccggacccatttagattaagtaaatttactgaggctccagaggaaagtcttcaagactcagatcttagttatagattagaagttaatcacttatgtctttggatgaatgcacacttacatgtagacatacagcttagaaggtatataagctctgaaaaactttgtaattttgagttgggctggcgataatttccaggccttctccctgtaactggttgcagaaagtaaaaactcttttcctccccagctcatctgcatcttgttattgggccacgagaataagcagcccgaccctcagtttggtttgggaacactatggcctcattgtcttttaaaagcctacaacacatacaatttctattccttggggaggctctcatgtactagtttcctgtcatctgcccagtagctcttctgggcagggactgtgacttgctcatctttacagccttcatagtttgggacagttggctgttaggttgggagaggatcgccatacagtggatgttttcctgtcctgcattggagtttcaggcctgaagacgagctgggaattggagcatttggcaaactgagtggatttaggtcctcaagaagaataactgaccttcgccttggggtgtgaacagtgcctgggattgtgttctgtctaaaaaaactagtcctgggtgggggcatctaggcacagagaagcacctgagcggaatgcaggccccaccattccaaggtacagccagcatcccgaggttgttcagtaaagagatcagaagggttggcctctctgacagacccagggtggccttgtgagattttataggcttcaagatggaaagggaccttgaaaggatgtctggatcatttctctgacctcaatgcatgatggccctgcttttaaaggcttctccagggagaatttctccacgttatattttctgtgtgacttctaataatcattccctggaagctatcgtctgtatctaatctgtagtccatcttttcagtctaccaaaggcagaatgctggagagtgagctttataaattggaaagaccaggctgagctaggagattttagttcctttgacctgtgccaggggaacgtagagtttcccaatcttcaaagcatctcactgcctctctgttctctctccaggtcatggagtgagagattcaaggaggttgatcattaacttagtgactaattgactttttattgcagtttcactttccaacggacactaccttatttgtagaggcatctgtgtcccttactacactctgaagttaaggtagaatgagaaggaaattgtatacttttcgactatgaaaatagaaatggaaacagtgtgatcattgtgccatcgagagaccagatgccacatttcagcatcgattcttactctatgttttgaccttcctccggcccaaggattctggtttaaatattttcaacactgattttacaagagaaattcagttctctttagcatataaatttctttgtgacactttaatgttgtgaactataaattgattcattgtgtttattttaaaaagtcttctctgttgatgggaggaattactataaatataattccattgtaaaggaaaagttacccaatctccccaactgtggctttctgaggtctgtcattttagatgtttccccaagctgcccgagcccctcattcatttctgggcctccggcatttaagtaattatgctagatggcacaggaattgttaccagataatatcttagaaataggaaaattacaagctaatttcagtccatctcaaattaatgagaatgttctttgtggagtgctaccagtgtaaacctttagaaaatgacaagtctgagatatttaaatcctctgtggagcttagcacagctctgccagcacacccaattgctattatctggccaattgctggggtggctcttttatctcccacctaggttttattaattcaatttcctctggggcttggctgccatcagcagcttctctcagggtggaggatcggggaaggcagtaaggttctaagggacatagctcagtctttaagactatcatctgggctggaagggccccaattcaaggcagtgactggcagacacagtgcttctcctgcttggtctggagtgcacaggggtggcctccttcatcccagcatacactttacatctttgatcttgttttttcaacctagaattatttctcacacgtgggcatggccaaaggctgtgctttaatgtggtttgtctccaagcagttgactcatttaatctctaaatgatttcctactcctcctgatgggggaggtgagcaccagggtgggagaagcctgatgtattctgggcaccggcccggcccctttgggtatctgatgcctctatctgtggtgttccctctgcacaggtgctatctctccaccaccaccatcctcagcccccatcagggccagctgcaacatttctctctggggtggtactgagggactatgctctatttggaagggcttgcatgacactttgtatgtatgacactgagaaaatttagttgtactgaagaatggaaagggtagagacatggagtgggctgaatggagcctgtgtccatcgctattacctcgttggtattactggccctttcccattcactatgagctcaaatacctccttctaggacatcatcctccatattcacagcccttccacctcatctgtttttcctttttcatgaaacttctcctcctctctgaattaagactgtggtctcagaaatcagactgtctgggttcacacactgcctctgcctaccgactctctggccttgggcagcacagcttattcagtctccctgcccatcagtttcttcagccacaggatgggattaataataaggcctaactcttggctgctggrggcattactcagaacttgtggagcacttgggcttagtgttctgtgggctctcattagtggggccactgccgtccatttggtgcattgggcagtatagaatgagaagaggtgtgtgtgtgtgtgtgtgtgtgtgtgtktgtgaaaagaagtgtgtttgtatgaaaagaagtgtgtgtgaatgagaagagatggaaaatgtccatctcttcttcataggcttctgcccttctcacccctcagcctgatgctgctgtggagcatataaggtgggctgcaagcatttgtagctaaagctgccaatgtgtgtataatgttgccggcatggtgagtgtgaccacatccatcctgttgcctgggtcttatctgcacatccagttggtcatttgaggccctctcatccacatcttccttcatgcccagaacctttctattggttggccaccagcagtgtacgtcaggccctgactggatctttctggcttcctactgtagtaagaactaccttgctcaccttcgtgcctccaggcttgcacactctcccccggctcacagttgttctcctgccggtctctaaggtgcaggtcaggttgtcagttcttaacttgacatccttcggaatctctctgctgctgcctggtaaattccagaccccttggcgtagccagcatggcctgagggaggacccctgcctctgcccactacgctgcatatcatgacccccatcctcccctctaacggttccaccttcccctgcccaaarattgggccatattgcacacattggagttaagcaatgaatgatagtgttgatattctaagatacaaagcgctcaggtaagtccatttttaaagttaaaatccaacaaaattgaccaagcatcagacaattcacgaagtacaatgactagtacagtcagacagaaaaatgttgagctgtagtaatgataagttaaaattcagactttttatgttccaaggaaccaaagactttaaaaagctaacattacacagttgaccaaagagctgtgatacactaccattcccagactcccagtaaagaggggcaggaccagatggggagaacactggaggctgayccgaatggagcatggggaaattttccaggtgatgaaaatgtcctccatctgtgtttgcatattcacagaacatctcgatataaaaattctctatcaaaaatgcatcacccatcaacagaagttgagaaaaaaaaatttaagaaaaatgcatgaaaatatacacttaaaattggtgtattttactgtgtgtaaaggctaactcaataaagatgattaaaacaaaatattgttaaccagtattagaagaacaagacactttcgtacattgtgaggctggaggtggggtcataacaaacattagttccacctttccaggagttaatttacttctaccttttaagaaaagtggtactgtttgacatggtaatttctttaggttagcatcctaaggaaagaattatgaattcaaagaatttgtcacaaaactaatagcagctaacaactgagaaaagaaccaaaatgtcctcactgggggtgtggttaaatgatgatgcatctctgtgggggccactgccagctcatgggcacctgtgttaattaagtaaaggtgtcccctctggatggaacacacccctctggggcttgcgagggggctgactgaatttcagcaccacctgtcccctcacctggacaccattgcacttcccaggtctagaccacggccctgatctatacagtggttgatgagacagatgttaaaactgatgccttcagaacagtggtgtggggaagtgttttcaatggaatgttaaatgatgataatagaaggtaaggccaggtgtggtggctcatgcctgtagtcccagcactgtgggaggctgaggtggatggatcacttgagcccaggagttcgagaccagcttggacaacatggcaaaaccttgtctctacaaaaaagtagaaaaattagctcggcatggtggcgtgtgcctgcagtcccagctactcgggaggctgactgaggtgggaggatcccttgagactgggagacagaggttgcagtgagccaagattgcgcctctgcactccagcctgggtgacagagtcagaccatgtctcaaaataaataaataaataaataaatwaattaattaatwaaattaaataagtaaaatgttacatagttctgacttttttcaaaaatgcaaaattcctaaaaggaaacccaccaagatataactggtggtcaatatgaatgatagaatcattgctgactttcttttttaaactttcttttccaaaattttcctgctgtcattactttttctagttttgaaaatmgacatgttcttcaattaggctctgtgtagtgctaacttctgcaacagtggtctctctgaacacaagatgagacaatggggattctgtagtggcatcgggggagacctgggtcagagcagctttgttgaagtcccagtgattcctttgttgaaaggagacgtctcttatcttctctttccattctgtaggtttgagacatttgaggtaaacagctttgagcagttctgtatcaactatgcaaatgaaaagctccagcagcagttcaactcggtaggcttggtttctagacctgggggtaccaggattggggggactcctctgggagggacagacaggccacttctcttcctctgaggtgggtgggccctggctackttctgatatcccttggttttcctggtggtacctccagctttcggaaggggctctccactgctcaggagggagaactgaatgggggcaactgtgctgagaggggaaatgatcytctctttggctttgactcccattcctctgagcctaggtgtctagggtatttaagcaacagcaagccagatatggggcttcctgtgrttgaatgggaatacggcaactcaggtgattgttaaagtgcccccaggaagtgttcacccaggcatgaggaatcgcctaactgtgctttgcttttctgcagtcataactatgacttagcatccaaaccttatctggcagttctctgctgtcctccagaacccagaactcactgagcccctgggggaggtgaatgttaaggtgtgcctgcagttcactcgtgtgacctttttacttgccctagcatgttttcaaactggagcaagaagaatacatgaaggaacagatcccttggaccctgattgatttttatgataaccaaccttgtatcgacctcattgaagccaagctgggtatcttggacctgttggatgaagaatgtaaggtaaaactgaygatgcaaattagttcaattctagggtagggatgtgatacaaggaaatcacataagatctcaaaggtggaatttcatctgtgatcagctggccttcagtgtgctggaagaagcgttggcaggctgcatactagaagcatgtaccattctgtgtgctagaagrcaacatgtttaaagtgactggcaggtgttgctacactggtaaacgtatgcctctcttgggggagcctgggtggcacgggttggcataatatggtggtttggacttgatgtcccaggtgacctaggtgccaagagaagaactgcaacatctaatgggcatccctagagagtgaagactaaagtctgggattgctaatgccacgtcagatggcttgtgagtgatagagttgcatggcatggtggcaggtgaaattcataatttccccatctggtttctgaggggctgtacctggtgggatgrggtgagtgctgacttgtcagcctggagagtgcctggcagcattgggagggtaaggtttagaggatctgggttttatcaattacctaacttctttagcctctggtttcctgctcgatgataggggttcatctaatctgcaaaatctctcccagtggagtggttgattgctaaaaggggtaaatatataccagttcctccagggatggaaacactaatcaacaggtataaaagccacatgattcttgctattgcaaggsaaagaacccacttgcttttactttctgctctcccacatcttgcctgtaaaggcttaagtgtggcttgatggtttggtaggaagtgtttcctttcagaagggctctcctagttttgttgcctttgaaaatgaaagggaaacagtagaagacagagaaaaatataccagttctacagcttgcatatttttttttaacctcctgaaggtttttagcatttcactagagatgtgggcttcatccygagaatcggtatccaagcagagataatctctcagtgtagcaagtgtttgtccaggcttgcctaacctgaggggtagcagtaaaggtaaaacaattgtccctagattgagtagcattggctaaatggctgaagtcacagcctaggccatcctgctgttcatgattcacttttattttcttggtttcagcatccactactaccacctcccttcccaaactcagccaaggtcatgctccttttccccagtctcttttgagattcccatcagtaaccgtctcctccagctccatacccccgaagctaaaggcagcgccatgtcttgtgtccaacccaggcctctgggatgctaagctggtgtggctccctggggccagtactcaaggaggaccctggcttttcactstcctcccaagtggtgaaggtgaaggtcgtatacagttctcagggcacatggagtaggcagtttgtcctacacaggtttgtggaaagcctgggtttcctgccaatcaggctggtgggggctagacatgtcaagacattgggtggtactgtggatgtgacacgtgtaaactcacactggtggccaagaagatgagttsaacaccacattagggaataagacaaaagtccacaatgtggagactttttgtaacaggtttaattgttctggaaattcaggatgatttagcatagtctgatagagcatcagtaacaggtggattttaagccaacaggtgttattacatttgtcaaaactcactgaactgtatgcttcagtgaaagggtgcattttactgcatggaaattattctgcaatgaacctgactttaaaacatagtagggcctggaagcacccatgtctctgagcctgaggaggttagggaatccccctgggtttgccgtggctgggcaacgcggtgctccttgggaaggatcctgttgggctgtggaagcagcctcagacacgtcctttcttccctgtctctcagatactttgcagggtgagagtgaataatacattgcactgtgaacagttgagttctgtgaccccatgagacaggacataaagtcagatgaaggattggactcatggtgcagaagcagcctgtgggaaaatcacttttcttggggaagctgtgcagtggcaggcagggtagtgagctggggtttagataagaagtgtggagatggggtggctgtgagtttaaagggggagtgtgcagggagcactccccagggcctgtgactggtgccacagctgcagaggagagtgcagactggaccagggtatttattaaaccacctgaggtggaaaagcccctttgcagacaggccccaaacaagccacagactaaaattgttcctccgttacccaagcccactcctccaagaaggtgtttgagtgtcagcaatgttaatttccaggctgctygtaacaagactctccaaagatgtctggtggcgggtggggagtaggtgcccaccagcccctgctgccttctaagccctatttgggttgggatttcctaatatcctcttcccattcatcagtccactttctctcagaggaacaggcaaccttgaacmctggaagcaattctagtaagtgaagcccaggcgctgtatcaagttggaggtgttggagcaatcaacggcaggtctgagtggggcggcaggctctgccctgtgtcctgtgatgaggattctttgtttcctggaagaaaggaaatcactcaggactgtggagtgaaatcagctcactcagtggggakgccagtgtcccccgccccctgtttcctcacctggcccagcctgctgtcaggaggatttactctgtattcagatcaggggattgtggtttcttaagaagtggccccaaaggtttccttgtctagcgctttcgtgtagaggtgtgactcctgtgatggagggaggtgaagtgcccttgccacatttatgtattcattcacatgagaaaccacatgttcacggaatagtgcactgagcccctgcttttcagatgtcagcacttcttgagagggtcaggcaagcactgaagtgtcatctttgatgacacagaaccagaaacactgtggaggaaatgacagaaggaagagcgtcgtggggagagcattcccaagcgaagtcagatgaggagggggtgttccaggtgaagggaatgtcacacttggagaatttgaagtgatctgatttgtctggaactcctggtgggggcaggtaaggttggaaagtagggaccatgggagaatgagaagccrtgtccaccctgagcaggcacttgggcttcaccctgaagctcaaggtatcagcccacaggggagaagcaggggagaggggttcagatgtgaatgatcagatcagcaggtctcccagactgtgtgcaagctgaggtggggagaccctggagggggcagcaccctgaggccatgtggtaggccaggcaggagagaaccagggcttccaggagctcagcagggagagggcctccgtgagtcccttgggtggaggacttccttccaagggagttgttgggacagaaacctaatttcagtaatttgaggagagcaggaggtgaggcagtggagacagcgagtttgaactcttggaggcttggctgtgaaaaagaagcggtgcgagagaggagcatgggcttgggtggactgcggccctccaggaggcaggggtgggtggatggaagaccagccaggagggagacctttgttccatgagaaggacagaaaggtgggatggctgtgggtgcagatgagtttctgcacgttaggacaggaatttgggatttcctgcttgacagcttctatttccccatgaaggaagagacgaggcatctgctgagaggcagcagggtcagaagcttgaagagaatggaggaaggtgggaatggctgcccagtaaacagaaagagaaattgcagagtgcgcagattgtttggctgtggttaaagaccataaattggggtttaggagttgtcgagatcaacttcctccatagatctaggaacagtgtcttaatccatagaagtgattctccgagtgaaattcagttttattttttggctgcagtacttgtataaaagtataatggcagggcttggttaaaggaagatgagttgatgtgtggtctcatccagccacccaggtatgggtaaggagagaatgggtagttggatttatctagaattaatgttttgctgagcgtgcagaggggtattttgtaaaggtgaaaaataaaggcctggaagcagcactgggggtggctggcaggtgaggaggaaggagctgcctccattctagagagcagtgaggactgcagagtcctgggggvggccagctgggcttctgtgatggcaragaggggaggggccagagggtactccttaaagaggctggggatccagaggtatttatggtacagtgatttgagaggtcagcaggggtacaaggcctgaagtatggaatggaaggagacagtgagtgaccaggaaggtyggtgccagtggcccaggaagacagggacgagaaaagaagcagacatagaataactggccttggggtctggttttttttttttttttggctttttttrttttgttttgttttgttttgttttgagacagtgtcttgttctgtcacccaggctggagtacagtggtgtcatcacagctgtcactgcggccccaacctaccaggctcaagcgatcctcctgccttagtctccccrgtagctggggctacaggcaagtgccaccatgcctggctaatttttmagttttttgtagagatgaggtctccctgtgttgttgcccaggctggtcttgaacttcttgggctcaagccatcctcccacctcggcctcccaaagtgctgggattacaggtgtgagccattgcgcctggttggccttggggtccttaaaagtcagctcctgtcagcagctttgctgggggcaggctttggcctcagaagatgtcccaggccagcgatggcaacatctgtgatagagagtacagtttctgtttagagwtccacagggaacattgagaggggctcagggagcccagaacttgcactcccccactgccatgcctgctttttttttttttttttttttttgctaytttattttactagcarggagtggaatcaggtctaatgtatttttaacagctttaatgagatataattgacataccatacaattcacccatttaaagtatacaatttggtggtttttagtatgttcacaaggttgtgcatccattaccaaccacagtcaattttagaacattttcatcaccccataaaaaagccctttagcagctattctccattgcccccctccagccccaggcaaccactaatctactttctttctgtatggatttgcctattctgggcatytaatacagatgggacctttactttttgatgtgatcagtggccagtaccacaaggtcagagggatttaggcctctgagggacagaacctgcctagacgaggactgagctatggtcccggctcctggctcagtggtctctctgcgttgctttgagaagagcagaaagaagttcatataagctgtatgtgcatttcctttttaaaggattcagttcagctgcrtattatggagctaccgatatccatgacccagaagttatcaaaatataagattttttttctttctcctgtggctgtttaaaatctatttctrtggaaagatttttggagataagcaccttctaccttgttctgcttttgtggcagcctttaaaactctgtcgtcaggcaggaagaattaacttgtcctgtttggaacaccagctctgctatttaatggcaaaagccacaattacttttgcaccaacctratacttccccattatgtgaccttggcaagttacttaacctctctgtctccatttccttgtctctaaaatgtttacaaacatagcacctagctgacatgattgtatgagggttaaatgagttgatacatctaaaatgtgtagaaaatggcctggcaaacaataagcactagctatgagtatcatctgagactcttgatcattgttaattcctgccggcccttatttttggttggaggtggggtggacagtgaaaggagagactgatccttgtcagaaaatatgtatacacttgaccttggttgttggtttcctctgcttattaattcatgccaatctgaattagtgaatatgcaggattacgaagtcttctcacagaagtccaatttcatctccaaggcaagaagattttgttcctagccaattttacgtgtttgcctatgtgggcttcccaccatggttctgtctgccccagttttgccagtccttctaggtccctcttgtgttcgtcctctgtcccacccggtcctgacagccatactgggaagaccactccttccttcacacccggtggttctaaacacagaatgcttggagacaaatataaaacagtatatatggaaagtgctgaattaaatatattttattgtctgcccagtgcaattaatagcctccttcaagatagttttcttttcttgaatttcctatggtgtttagcattgagtattcaatattagttatgccaaaatgaatcttgagcaaaatcagtttgcttacaaaggatttaagaaattggttcccaagtatgtaagcattttctttatggtgcggattttattagtttaccataaaaatccctttgtaaacggctagtgcaagggtcaccatcaacacttcctgatccaaatatgcaatctaaaccaaagaagggcaggtcagttagtgacccgtcactgaggactggactgatactggtcagtaagtgtgtgcagcgatgaccagggatgacagaggagggagcaccttcccattggaagagttgctgtcatccttgacaatttgagtggtggttacggtgactctgttacattttcaatgaagtaagatgctttttacttttaaagccatccataaagatattgaaaggggctgcccttcagaattcttaatgcagtggagcctctaagtctgactttagacagtgagagatgcagagattagcaccatgtagaacactcactaggtacttagttctcactgcatggccagagcccagttctaagttctttcagggacacataagcaacgtaaggcacagccagtccttgatcacaacaaacttacagtttgtagtgatgaaacccaaaactcaggggtgcacaatattctagggcatgtgtaagagcttgattgtgaggaattccaaagaagagrgaagtgagatcaacagtggtcaggaaaggacagacttgagccaaacctggacaatggtatctaggtgagtttagggagggaaggtaggctttcctgtggcaggagttcacctgggtgagtgggtgagcttggcactgcaggtggatgtgttttgtgatgctgatgtcacagccccagttgcagggaagtacyttcaggtggtcctgcaggctgtgactctgctcctgtgaccttggctttcaccctcatcctccctagcacttccagtgtctgccaaccagcaggctyagctgctcccacaggtcccaagggagccagcccacatgggatgagggcacgccgtggccggatcctgaacatgtatggttgaatcattctttgcaccgtccagttaaggtcctggttcgagggctgaatcaaccttcacrgagccagcctactggtcccatccctctgctgcaacccagggcttccttcttcctcttcacaaagcgctctgccctatcttgtggttctgcaggtccccaaaggaactgaccagaactgggctcagaagctctatgaccggcactccagcagccagcacttccagaagccccgcatgtccaacacggccttcatcatcgtccactttgcagacaaggtggctctcctctctgttggctngggtattcccttggcccctctctaagtagactcartgggctctagacctagaragaaatctgtcccttctgaattcaaatggcctgaagcctcagctaggttccccttccatcctcttttacccacccctctacttctaggggataccaagcktaccacaaggcataacttcacagggggtactatagttgcccagtcattcatatatatatatgaatacacacacacacacacacacacacacacacacacacacacayatawatacatacacacatatatgtctgtgtatatatatagtctatacacacacacatacacacacacacatgtctgtatatatatagtctacacacacacacacacacacacacacacacacatatatgtatatataaattctaaagcagttaacagtctaccctcatggagcttgagagagaagggagggctgtaaacaaagtaccaaatggtttggcttcttacctggagcctgtgtagctgctcttcagggggctgctttctcagtagctggtgggtgcatagaatttttctaagtggatttctgtttgctatgcactagctcggtgtttcttaaattgcagtgtgtgtatgaatcacctagggtcttgttaaaatacagattgattcattgggtgtgaggtgtggctgagaagctgcatttatagatccctgaagaaaccttttattatgggaactccctttaaaacaatttcttccacaaaatgaatactcagttccctgtatgtaaatcctgaccatttattgggtktgcattttaagtggaaacatctgtgggtttcctatctactcacagctcttttcagaaaatgctacctggatgagatgaaagtggttgagaaactgctgaagcactaacgrctgtgtctctctctggttgctgtggccccaggtggagtacctctctgatggttttctggagaaaaacagagacacggtgtatgaagagcagatcaatatcctgaaggccagcaaggtaaagagtgtcagaagtggggagtggagcaggaatgcccacggccagtgctggacagggagtggtgatgcaacctccttggggtggaaagacagagatgctgggcagggaggaggccaacgggtttgttggtcatttcggtatgaaaacagttgaatggccataccactgtgaatgtgtccaatcttgtctgaaaacactttagtatggcctgatggagggaagaaagcaaggagtgtaggggtagggggagaaaactgggaaagatgcctgctaatggaggggataggggagcatgggaggtgacaggaagagaggacggtgagygcagtgatggaaatgtggctggtgtccatcatgtcatctgtcctccgtctcctgcctgcagatgtaagattatttaaaccccatcacatctagtatctgcatttaatttgttcagcartctatagaacctctctatmagcagaaacttaatggaatagaaggtgggatttaaggaacacttaaatctactactttggaytctttctctgttattakcagaatttcatttatttccaagcataggaaaaaggtagcaaatattgtgtccattctacaggtagaggaaagaaggcaccaattcacccaaacatatatttactaagcacctgctttggaaggcactgccctaaacasaccattttcacacaaagatgagcaagacagagtctgyactctggttgctccccttctaatgggctgtgagtgggcagatgaagacacmcacaggtaactgtgaaaggagagaaggagcacggggagagggtggtagagtcaggggaagcgtgtgcactggcattctaaaagccgactctgatgcagatgccgttactggctttagccctgcagaggaaacccagggccgggggtgggggaaattcccaggatttaggaggctttctcccagaccacwtgatactgaactcactgcaggggcctgataacattggagaaatggcagattaatttctctttgtgataagctttagatgaatgcaataggatgagatgatagaatggagaaaatatatccagcaaaatggacccaggacataaagccaagtaaaccctgttctatcacrtggtgaggggtttagggaggatttgagtcagtagcagcatgcagactgccaagaacagacccctgcccagtgtgatctctggatatctggaacatcagagaattagtcatcactgggacaaattggccgtgrgtaaaagtgaatatcactttggagttcaatgcaagattgaccttgcagctccytaagtttttagatctccagtctgtggtggttaatgtgactttttccattttttcatgaggatggtggcatagggaggagccccaaggcacagggaaagagagtagatggaagtgttctgagcactaggatccccttcctcacgatggtctcttacgatgcctggaggcctgtgacaacttatagggccagaaaaytctgttgtctcagtagaagtttgtcctttcagattagaagcagaaacgagggatggagagaagagaggtgggtacttttcatttaatacagagtctggttctgccattgtgttgatttctgagcatcttaatttgagtgactctcagggattccagaatctaaaaaggagtggtgcccggaaaactctgttatattcactctccagcaggttatcttttattaatagctgagctgcttttcccttatttttatttatcagctttattgaatatttgtgtagtatatagtggtaacygacacatgtagttaatctcatggaacttagtgaaaaagatgcacagtttaattacaaactgtggtaacgctaagaaggtcaagaagaaggtgctatggaagagaatgataagggtaggttggtggcccccargaccacccccaggttcaaccatttgctaggaagattcacagaacttagcatatagttatggctataatttgttacagcaaaaagtaaacagcaaactcagcaaagggagaggtggatggggtgacrtctcccggagaccaggcacaagcttccaagagtcccttccacctggagtcatacaggatgcacgtaattccccctagaagcaagtcatgacacttcttttgacatgcctaccagggaaggtcacctgagcccaggcggccagggtttttatttggggttgattatgtaggcacccttagcctagcacaaaccaaaattccaaactcccagaaggaaagcagatgctcaacataaattattgtttgcrtgaacaatttaggcacagtgaactgttcttatcagggaatggtaaaaatccaagttcccctgacaccagccaggggtcaagcagcctttctaaggatagcagatgcaggcctgctgtgttagctcttttctatacaagaatattgttttagattgcaggtactgggtttttattagaaattaaatgtaagctcataaaaaattaaagtattgtagaaatatataaaataagtcttctttcccactccttgacccatcttttgatgggtcagaatataccctattctgcatgttggtacatctttttaagattaaaataagtacattatagacacgtagtcctctgtaatttaatttttcagttaccattgtrtcttggttgtctttccacacgagtacacatctatttctcttttttaaacaactgctgataatttgctatttcaaataatgtagcaatgaatatcctttatgtatatctttgcatacttctgtacaattatgtctgttgggtaaaattttagaagcagatygatgatggttcaaagagtatgcacatcaaaagtgtatagatgttgctaagttggaggacaaaataggtgtgatctactcttgaaatgcaacttcctcctcctctttcctgcccactaaccacaatgctagctttccccctcaccagctaaaacgtctaaagagccagtgacctttttgccacccctgtccccatcccagcaacaaccctgagatgtggtgatgttggctggcagcactgagattaaccaagaagggctctggctaaccagaccctagctggaggagggcttgagaactctctaccctgagcccctcctagcctgtttcagacgtctcaaaagacagaaarcaaagattgttgctgtatcaccataaacctgcagatgggctatacacagactgcagctgcaaatcaaagagtgattctaagtatgctctacaccatttgggcagatgggcatgtctggcagcatctgtcattttagtatctttaaagctcatcatttactgagtgatgagtctattttctttaaaatttttagttttcatagtagccctatgaggcatatgtttctaactccatattaaagaaaaatgaaaacctagaaagatacaagkttctatgtcattacattaaaattgtaacgcttaattttttattggttttcatttagcacagctaaatctcaaatcctrtttgtaaattcataattttacctaaagtacttttattttatgagagactttttttttctgttgggtgacatccttgataagaaattaacaagtcatcatgaataattaagcagtaggggatagaagacacccatatactctaccaaccaaagggatgttcgaagaactcccactacgagcagtgaaataacagggtgttaatgagaatgtaattagtgaagccagttccattgtctgagcggttgtaatgtagctaattgctttctcagctatcggagctgtaaatagagacttaagtaaagagatgcctctttaaaacatgacttcaagttattaacagagtcattttctttaaatactaaaggatggaggttttcctttttttttttttccagttttccagtttttatttattgtgaaaaggaataatttatcaaccaggagaaaaagaaaactttaaaaggagaatgtttttcctctgaagattgcctattcctggccaccactacatgtaggtcagagggacragctgtgggtcacgtgtttgtgccagcatgtgctgggcagtgagggtgtactgggcagtatttctgggctatgggacaggcatcccagtgccatctttccactctatcccagcataagggatcttgagatgaatgtggtccagagaccaccttggcccaaagctacttaccctgagttcatgaaccctacacctccttcccagaattaattttccaacaaactcatccacctctgaatctcagagatcctaccacttccaagtgcagtctcaatgacagggacctacaattaaaacctagattttaaaataaaatacaaattcaccagactgaaccttggtcatgttggtacccaaattacagcacaggagtcgcaggaacagctcacacaaggcccaggtgttcactccccttctccctcctgctgcttatggcttgacttcagcttgtcmaggaatgacaagtacacaygtccattgctttccacactgatgtgtttttaaaaggttatatacacacaccttgttttgaccaaataagtttgctttttaaaaatcttatgtttacttttaattttttaacttattttctgaataggagcttgagataataaacatactataaaatgttctcaaatgtactttgcttcctgtttaagatgtgctggtatttgaaaagcttctrccaatacttaaaccaagcagggtactatgtaggataacyttttagttgacaaaacaatatcgtctcccttatratacaggagagtccatgttgtcttccaaaaaaaatgaagtactgagacttttcctccaaagcctatttaaaacccttttaaaatattcatctaaatgtcagagatttttccctccaaagggtaccattagtcatgtaaaaagaattgattgaaaggaaaatgtgtttrttatgtttacagccatagatttctttttaaagaaaagattctggggaagagacaccagtcaaactgttcttatactatgtcttattttaactttatgtgtctgtttcagaggaaatatcttttatattcttataaacacaaaygagtaggtgtgatttccaaggtaacagctatgtgtcagctgtaattgactttttattttattattattatactttaagttttagggtacatgtgcacaacgtgcaggtttgttacgtatgtagatagcattaggaggtatacctaatgctaaatgacgagttaatgggtgcagcacaccaacatggcacatgtatacatatgtatacakatgtaacaaacctgcatrttgactttttttaaactgccaaatggcctttacaaagttttttcatgcttcttagtccctttttgatttgccccaggcttttaaaagctatatataggaatgaatagcagagaataccaaagccagtccctatgtacaggttttaaacaagtgacaggaaaatattggtttgtctggaggtgctagcttgagtgtttgagttcgaaggggacaaattgtgagaaatgcccgggtggctgccctaaggtaaattgtggcagctctcttactgctcagtcagcttataaacagactgcttaataactctaaacacataattggagtttgtcaattgccctgatctgattactatacactatatatgtcaaaactaggtaccccatgtatgtacagttattatgcgtcaattaaaaaataaaaatttaaaaacttmttttcrctcagaaatgtgatcctttgtatgggtcctttgtcaagtaagagcttggtgactacggctgggtgcggtggctcacgcctgtaatcccagcacttcgggaggccaaggcaggcggatcacaaggtcaggagatcaagaccatcctggctaacatggcgaaaccccatctctactaaaaatacaaaaaattagccaggcgtggtggcgggcgcctgtagtcccagctactcgggaggctgaggcaggagaatggcgtgaacccgggaggtggagtttgcagtgagctgagatcgtgccattgcactccagcctgggtgacagagtgagactccgtctcaaaaaaaaaaaaaaaaaaagagcttggtgactacttttcattgtgactctgggcttgtgtatagttgggacacttctcaggtgaggtatccttacgtagcccaatcttcttaagggatgggtgtggatggaaccagtaatttgtatttcttgcctgggtcttttgcggatgtctacagcccagcgttgaacatggtatctcttagtctttcagtcctgtcatcaaactagatctcttatgttcatttgagtttataaaacaaattttgaatagaatacraagcatactgtacctccttttgagaactaatattccaacacagtcatctccctctaaatcccagatcctgccactkccaaakgcagtctcaacagcaggaacttaaasgaaaacctagcttttcaaataacatacaaattcttcagactaaaccttgattaygtttgtatccagattatagcacagtgccagcttaggtacaaatctgccttggacagtttttactttctgttcttaagttacaaagtccctgtttaatgtataaaattaaaagcatagatagcctttstaatggaagcaggagaaaggggctgaaatcttaaaattctcccattggtgattctgatttccaagttcctagtgtgatttttcatacagatcaagcatcacaaatctagaatgctctaaaatttgaaactttttgagcaccaatatgacactcaaaggaaatgcatctacggccataccaccctgaacgtgcctgagcttatctgatctcagaaactaagcagggtcgggyctggttagtgcatggatgggaggaaatgctyactggagtatttttgcattttggattttcagattagggatgctcaaccagtaagtataatgtaaattctccaaaatctgaaacacttctggtctcaaaattctcaaattttgaataacggatactcaatctgtacctgttaatgaccttagggcttaatatttttttttttacagtaaaagctactatgaatgatttctgtaaatttaaccccctccccactacccaatagtatagttatgcagatkggtaacttctacccatgcctcaaacatcttgaaaattcacttcagaaagtatatgaattagaattatttaataagccagtgttttgctttgccatgacagacaggcatgaatcacaatgrcatcttcaaaatgtgaacctgcctccagcctcccattatttccccatggagctttctcagcaccagtctgacgggccactttgtcctttcttacctgtgtcttggctctctggccctggtccatggagcccccaggcccagctctcctctcctcctctcctcctcccctcctcccctccwccagcccattctgctcctgccactctcagtgtttagttcacctgaacactgttcatctatggctttctgccatagacagtgaggacaaacaaatgggcctttaacatgtggctactggataaggtttgcatccagagaaaactctggctgttggttggaatgtgtttgggtgaaggtgtgcccggaggtatgccctcacgctttcrgtgactgtagtgatccaggagagagctgggtagtcctgagctggagcagcagctccagctccagattaatgaaaaaaaaaaggactgcatgatactcccctgtgggcagaacttggtacttgattgagatataggaagtagggtgaggacaggattctagcctaacctaggaagtcagtgggtgaaggtggtttgggctgtattgaattcggagttcccagtggaacacctagaggaaagaagagcgagctggaattgtgaatcatagtaacaggaaaagatccagactggagtggcaggatctgggagggatggttggagccatggcctaggggagactgtccccagggactgaggtaagtggtgaggatgaggctctggaaaatggcaatgcaaaggayggaagtgcaggaaaaagcyccgtgggaggttctgggaagggygccgggcagggagaagattrgaggaagcagaactgctaagtgtcaggaagggacctttacaaggaggcgtgggccagtggcacagaggcctttgaagaggtcgggtaggatcaaaaatgaaagcacaccacttctagccrttggacttgacaagcactggagttgctttcaaggtacatttcagcagcatrgggaggaggccatctggtggagggaggtctgaggaggagcggcgtggaaggcggtgtctgtctgtggatgccttgctcgaggtgatcgatggtaaagtgagaagagagacaggctgaacagggaggggtttgaagcaacagagaagcttgaacgtagctgtatgcttggtggatagaagccaggggatggagtgattcaagtataagaaaatgcaggaatccaggtcagggagtgacttaaaggaatcatctggtcagctcttccatttatataratgagcaagttaaaatctagtaagcctgagaggttwgccatgggccacacggctatcaagttgcagggtcatatctaaagttcaggtctcctgacccagccccatgcccttcctgctatacctcattacttctgagctcactgctaggttgtaagctcttctggtctccmtggtctcccttgactcctctaggcacccaggacagggcttcatgtgcagtgggctcttccttatgctgtagccagggatctgtttagaaagaactgccattgctggttctagtcattgccgttctctgtggtgcattgttgcttggactctggagacaggctgtctgggttcaaatcctgactatgctacgtacagctctgtgatcttgggccctaagtctcagtttcctcatctgtaaaatagagtgcaatggtgcttacaccactgggaggcttggaggagttcatgtgtgccaggcatagtcaacgtgctcaataaatattagcccctgttattttaaccctttaatggcttcccattgctcttaggataaaaataaaaattcttaactgaggcctacatgagctagtccctcttgcttccttctcactgtgtacattgtacgttgaccagctttatcttagccccccgaatgcacagagctccttcataggtgccattacttccaccccataacatgctgtcctccccatccaatgtcctacagttcagacttccctccctaagagaatcctgtcttcatttcccacatcccagacccccgatttagtcgcatctttgttgttgatttcctttaggatattcatcttcttgtcattatgtttttaattrtgggttattttcattagcattcaccttccatgctagaccataaactccatgatatagaagaggctaggcttcttctataacacttttgttttaccagtycctagcacaacatttgttgcatatttgagcgtcagtaagtgttgatggataatgtgtggatgaatgaatgaatgcayaaactagtcaatctagtttcttgacagtcagtgacctagtatttactttctctgctttgactgcacatggaattgagtacctaatacaaatatcggttttttatgatgttggcatatggattttagccacagatcttaaattgtgtttttatttctgacagctcactagttaccttgccatctaaaaagacaatatttatgactttgaaatgccatgcatgaagagagggaggaaaattttttttttaattatactttaagttttagggtacaatgtgcaggtttgttacatatgtatacatgtgtcatgttggtgtgctgcacccagtaactcgtcatttaacattaggtatatctcctaatgctatccctcccccctccccccaccccacaacagtccccagtgtgtgatgttccccttcctgtgtccatgtgttctcattgttcaattcccacctatgagtgaaaacatgtggtgtttggttttttgtccttgtgatagtttgctgagaatgatggtttccagctttatccatgtccctacaaaggacatgaactcatcatttttttatgactgcatagtattccatggtgtatatgtgccacattttcttaatccagtctatcattgttgaacatttgggttggttccaagtctttgctattgtgaatagtgccgcaataaatatacatgtgcatgtgtctttatagcagcatgatttataatcctttgggtatatacccagtaatgtgatggccgtgtcaaatggtatttctagttctagatccctgaggaatcgccacaccaacttccacaatggttgaactagtttacagtcccaccaacagtgtaaaagtgttcctatttctccacatcctctccagcacctgttgtttcctgactttttaatgatygccgttctaactggtgtgagatggtatctcattgtggttttgatttgcatttctctgatggccagtgatgatgagcattttttcatgtgtcttttggctgcataaatgtcttcttttgagaagtgtctgttcatatcctgcgcccactttttgatggggttgtttgtttttttcttgtaaatttgtttgagttcattgtagattctggatattagccctttgtcagatgagtagrttgcaaaaattttctcccattctgtaggttgcctgttcactctgacagtagtttttttttgtttttttttttttttttgctgtgcagaagctctttagtttaattagatcccatttgtcaattagatcccatttttgcttttgttgccattgcttttggtgttttagacatgaagtccttgcccatgcctatgtcctgaatggtattgcctaggttttcttctagggtttttatggttttaggtctaacatttaagtctttaatccaacttgaattaatttttgtataaggtgtaaggaagggatccagtttcaactttctgcatatggctagccagttttcccagcactatttgttaaatagggaatcctttccccattgcttgtttttgtcaggtttgtcaaagatcagatggttgtagatatgcagcattatttctgagggctctgttctgttccattgatctatgtctctgttttggtaccagtaccatgctgttttggttactgtagccttatagtatagtttgaagtcaggtagcatgatgcctccagctttgttcttttggcttaggattgacttggcaatgcgggctcttttttggttccatatgaactttaaagtagtttttttccaattctgtgaagaaagtcattggtagcttgatggggatggcattgaatctctaaattaccttgggcagtatggccattttcacgatattgattcttcctacccatgagcatggaatgttcttccatttgtttgtatcgagagggaggaaaatttatttcaaagatgctgagaagctgagaataggaacagaattgtcacctgttggcagctaacacttgggggcatccttagtgatctcactggggwaccctccagggtacctgcctgacaacaatatcatcagtatccttagcagggatttgtctctttatctccttccatggagctatttagactctgcatrttgtgaataggattatcccttccatgccctcaagcagggatttgaggtgtgctttgctcagaaatatggtagcattctctagtgctaatcatggtgtcagcagcctattgtagccacagaatagccagcagtgagaatgggcttgggctgctcaccagagatggccttaagatcattggttggtgcttttagactgaacttagaacccaggccagggaactaaggaactgcaacttttatttgcatgcaagtcactctggtggaaaatggaaattggatgcttctaatggttggtgtgtctgtgagaaatgaggagtgtgagggaaaagtgaaactgacacgtgttgattccmgcatgattgtccatgtaggtgcacatgaaacacagttgtttcatggctttataacccattagactagctcctgtgctgtgtaaaacaaaacactgacttgtgttaatttctcttgactctaaaactgaagctactaagatgtatgaactttgtaataactaagaatgaggtaagaggaactaatttttttgtatgtttttagtttaaaatgcttgatgtagaagattagcccataattttcaccagcattaggtgctgttttaarcattaggcattgtaaccttgtaygtatgtgcaggtgggcacactcattctaatccactgtgatagtgaagtgttcctgcataaggtgaggcttaagtcttgctgaaaacaaacccttggatccgtggaattcatacaagttgctttatgcttgatcttatccaaaaggcctagaagtgatatgggttactttaatatgtgaaaaataccagagtcgtcagactgaggggggttcactgagcaaagtgtctgcatctctccagtttctccttggacgtgacctgggtagttgctgatggtcttatgcctgccttaagtgaggtcaggttgcaagaagccccatggaaatgggatggtcatcatgtgttttataacccccatcatatcaccctggaactccagcacaaaggtacctaataaggttgcagaaactgcctttgagtgtgcgaagtcacctgaatctgacaggttctgagaacagttctagtatgcyaccagcaccatcttgctactctrtctggacactgtaatgtgctgatgtgataccatgactctgtactgtcaggtatctctgactgcagaagggagatgagccagggcccactgtagactgtaatgtgaaaaagctcatactcattgcsttgttttgatatgcttctaggactttttgaattcacctagaatagtgaattattttgtgaattttgracctattcttacatgattctttctttccaagctcttggcatgatgctgttgatatgaaagcctttgtaggtactcagtaaatactccactaggctggaacttaatttattgaaggtctcggcagtgcagagcrtcaccagagcatgagctgtcactgctatatgggacctgtagccatacatgaagatgatgctgcatcttcagtaggtagcttgccttagcctgaatctcctacaagtctcaggagatgatgtcagctagagaaatgtttcatggaagtgttatcttatgtatttaattgttgttgcaagtacctcaaaagtcaargctatatctgaagcccttttatatttctacttccttgatattgtgggtttaaatgacaaggctatatttmtgtattgaaacaaattctgacctgggcatccggaggccgaggttctagcccaggctcagccactgactagcagccctttgagagctggtgctgaccattgtgcttggtggtggagggaacagaggttggagcaggattccggtaggttccttctccccagtcgcctacatcctcacctgccacatggaggtgaaagttgacctttacatttgttccagatctaaaattctatgttgtttcttcagatsaaaaatacaactttcttaagcatctgtacttacgtggttcagaaagatcattcatgtaggccgggcatggtggctcacacctttaatcccagcactttggaaggccgaggcgggcggatcacgaggtcaagagatcgagaccatcctggccaacatggtgaaaccctgtctgtactaaaaatacaaaaattagctgggcatggtagtgcacgcctgcagtcccagctactcgggacactgaggcaggagaatcgcttgaacctgggaggcagagcttgcagtgagttgagattgcgccactgcactccagcctggtaacagagcgagactgtttcaaaaaaaaaaaaaaaaagaaaaaaaagaaagagtgttaatgtatataacccctagtaaaagtaataaaactagataatgtctgagccctatatgctggrcacttttctacatgcttacayggattctctcattcagtcctctcctcagcccttgttctcaggaggaagggaagtctcagcaagtgtagagctcaggattcaacacagaccttgagggggtgagggtgtcccaggacaccacagagcctgtggggagacacagacaggagtgatgggtgctttgggagagggtcacgrgaggggcagggctcaaccttgagagaggggcctctcaggataagtatagaagagaaagggrtgggggtatttcaagtaaaaatagcacagtaagcaaaggtatagaggcaggagtagtgagcattgtgcctatgagacagcaacgtgaccagttggatggttttgcaaggtattgtctgagaggggtgagtgggatctgatcagggagtcctcagacactagactagggakttcagacacaatggcaggagaggggagccatgcacttaagtgggggttaaaggaagagggcacagggtaggtgagaaggagcagagcctagcatctgaggctgtagcatttagcctctcttctgttgagattggaattgctcaaggttagtgaatggggcctgtaygttccttttccctccctccttttcccccaacccctgcaggagtgtggtaaaagccttgtaatactttattctagccccagcattgacttccccaagggatgatgacaggacwgtgttcctgtcagactgaacttcttgatggctgggactctgtcaccagcgcctcatccaaggcctgcatcttcaccttgttacagatgaagatattaacctcttatttagtattcataacaaccccatataacaggcataggcttatccctattctgatgagaaaacaggtatcagggaagttaacttgacaagatgcaataatgtagaaaaatagaacttaaacttaggtgtattaaagcatagccacctcctaccacaccacaaggaaatgaagttctgcgcatctttgcaggtgaagattgagtragattgtatgggaaagcaacttttttcctaccatttaaaaaattgaattgtcattcatacattacaaaattcacccttttgaagcacacaattcactgggtttcaggatgttcaccaatttatgcagtcatcaccactaaaagtctgggaatatttttattactccaaaaagaaatcctgtcccccttagcaggcactccctttctccccttcttccccttcctcttcccctttctcccccaacccctagcaaccaataacctactttctattccctggatatttcatgtaaatggaatcacacactatacgaacrtttgtgtctggctgctttcacttggtataatttttttgaggtgtgtccatgttgtggcatggatcaggaggtcatttctttatattgaatttattaataatgttgaataatccattgtatggaggtaccacatttgtttgtccattcatcagttggtatttgggttgttcctaccttgtggcgcttttgggagtaacgctgctgtgcaggttggtgtgtgggttttggcgtggaygtgtgttttccgttctcaggtatatgttgaaaagcagctttgagaggaaacatgtaaggtgcaggagatgtcacttycatcattcttcctgtgattgtttctagttcccactagtggctgacttgtttcatgatgacaaggaccytgttcctgccaccacccctgggaaggggtcatcttcgaagatcagcgtccgttctgccagaccccccatgaaagtctccaacaaggagcacaagaaaaccgttggccaccaggtcagcccyggaccaaaagctatgggcygaggtgcatgtgcagggctggcctctctgtagatgaaggatggcggcagggtgagagggaagccatcacagcagccttgacatcagtagcctcagccatccagctctatcttgtgtccttagaagaaggaaactccaataccttcaccacaaggaactaacagagggaggagggaaggggccgaccgtagcctccataagtatgttaacrcctgtggtggggctgtgycacagggccaaagacacctagtgtgggaggcaagagggcctggaatttataggttagagaggaggcttaaggaagctgtggatcaggagactaaaagcaacttctcctgctgtggggtctctgtggctgttctgcccattgtgtctctggagagaagagaagagaatgcttgtcaagtccctggcagccaccacctaacatttgttcctatgagtttgccattctggacatttagtataacaaattatttccaggatacccrggcatcggatgtcagggtcccaggccctcaggtttaggaagagcaggcttccggtgcacagtgaccaaatctctcctacagtatttgcccacctttcatcttatttsatccacagcactgggagttaggcacattagsgggtagtctgtcccccatgtaattcaaggaacccttaaataggaaggacttgattttggtcacagcaagatagcagtgtcagagctggaatcttaccccaggtctctgaaatttcttccatccttctggattaataatataatagtaacaataantaccgccacccatatatgagtttttcttyatcacacatccacgacttgttaaaactaaccaagcactggcttttgtctctctagttccgtacctccctgcatctgctcatggagaccctgaatgccacgacacctcactatgtccgytgcatcaagcccaacgatgagaagctcccctttcagtaagtgcctgctgggcattagcctgtccagcccagccttagaggttcaggtggaacagggtggcccaggccttgcctgggggtctgtggccttcagcatgatgaccacctggacttacactccccagacatcttacttgctgcagacagactgacagacacttgctgagtgccaccagtctgctgtccaggaggtcttaagagaaaaaatgcygttccccgtatagtggtggtcaggaatgtgcatgcttgaataaaatagagaacgttaaatgtagccatgagtacatctcrcagcaagtgttaaattcaggcttggaaaggttgctggagtggtcaggaaaggcttttcttgtgttgaagaatcaagacctcacatkatgtgttggacgataggacatgaacatggtcctgtttctcacattcccrtctgctgctaagcttccagaattatccacatttgctccccttttcctcactcctcaacctactctgatccaacttttgtttctaccctgaccttgaaactttgttccggttctgtccatgctcatgtggctgacctcaccctaatctgtagaactcttaatgatctttgtacatcttggtttctactaaattccagacaagtgtttgtgcaagcctactacagcttcattatccaccttgccttcagcacatctgagaccacactcttcatctcctgccaccccccaagaatgattcctctttcattggtctttgttgtagtaagaggcataacatttcctgttatctcatccacccatgagacctgatctcccakactagaagtctctctaacctgctgtgcagggggaatccctgtgatgatgggtatgtgctgtcatctgccttatccagtgtgggagcygcttgtcacgcatggctatcgagtgcttgaawcctgtctggtgtgagtgaggaactgaattctgaattttatttcattttaatttattttggataccccgaggtgctagtggccaccatacagcatggtttaacccttgattcttccgtctccttcacttcccagtgtctaactgacgtcaaagtcccatgaagtctccatgcacgttcctcaccctggtctcccttttctcttccttattcaccttgttccagatcctcttttcttgcctgaaatactaccttaaaccttyaaaaaacatcctctcactcagctstgcagtctcttctgctctgggccttcacgcatgctgttccctctggccagaggaggtgtatttttaaattttttaagcaccttattcccatctttccttccycatgatttctgtttcgggcctagtataatttctttctgtgaaataacttactttgacaattttgactctcagactgaatatctgaactgccttctacactckggtcatgtaataaagcttggcttccattcagatgggctctgtgtggaaaaggttaaggagacagaatgttaccagttttctwtgcagtgtgctgcttgcttgctcttcccttcctccaaatctctgagacatgcttaggaattscccctgggtggcttctgtttaccrgctgactccagaagagaagaggctgttagaagcgtagtgtgtgtgaaagactcagattctktgtgaagggcagagtgctgtgcagggcccaggggagaggagatgagggctctataccagctgggccagaccagctgtggccttgggcctttccctcatcagagcgtgkccctgctgtgggacagatactctgctgggtctcccctctcaaaggagagaagacactggggactttctagtcctgaggtcccacttttctaagacactgccttatcttcagaaccaaaatcttcctcccartacaaagaaaaggtgggaggaatactgaccatgtcatgataccgggattctagtttgagctcactgctgatttggccagtcgcaagctagtcttttgctctctgtgtctagtttgagctcactgctgatttggccagtcgcaagctagtcttttgctctctgtgtctcatttccttacctgttaattctgrtgagggcctsgtgtggtggctcatgcctgtaatggcagtgctttgagaggccaaggcaggaggatcacttgaggcaaggagtttgagagcggcctgggmaatatagcgagacccaacctctacaaaaaattttaaaattagctgggcatggtggtgcatgcctatagtcccagctactccagaggctgaggtgggagaattgcttgagcccaggagtttgaggctgcagtgagctrtgattgtgtcactgcactccagcctggatgacagaggaagactatctctcaaaaaaataaaaataagtatcctgatgaaagaatctgaataggaattattcatgagagtatawaaatttatgtgattacagttattagttacatcatcctagaaggaagtttctgtgtctctccacccatttcctrtaatcggagttgctcagcctcagcagcactgacatattgagtyagagaattctttgctggggcaaggggtgctgtcctgtgcatcataggatgttgagaagcatccttggcctctacccactagatgctacaagcatcccatcattgtgacagctaaaaatgtttttagacattgccaaatgttctcttggggacaaaattgcctccagttgagaactcctgtcccacattaaatgctttgatagcatgacctatacaaaaggctttttcctctgctttcttyatttaagaaacatctatcatacctcttactaggcactgggctaggacaggtagaatgacaataagacatgtcccctatgcttaaggaattgtctgtcacaagtaactggcaatgccacagaagtggctgtcggtggctctgtgaaagtgctgacagggcagaggcaagagagagatgaagtatccagagcagcagyggcctggggcggktgtcataacctgggaacgcttygtggaggacctggtcactggttttccgaaggccagcccaggtctcggagtctcagagttctgagatgtgactgcaggatgctgctgagcctggggaagcaggtagggagcttgcagcccrtggagaaatcaattccatggcgggcaattgtggaggtagggctcggttctaacacagtgggatcctctctttgcatccagcaggctccagggtctgctaatcctattgggagaggaaagcatgaacttcagtttcagcactgtgaccttctatgtctttggtgatttttctatgttaattgtccttgctatggtcctccaagatttaatagaaggagggctggttttccattcctagtcacctaatagtgaawgcagtgaggyggattgagagatgcatttgacggtgggttttctttactgttggggagaggaagtacagaaggccagctggcctcmcatatccccttgggatatgtgaacagggaaagatgatggcaatatcttctttgtatagtgtctcttagctttttctaaaagcattcttcttgttkttttgtttgtttgtttgtttgtttttgtaacatagtcattacagccaccactgcttyatagttgggcagatatgttgagctctcattgagtaaatgaggaaaatgaggtacagagagactgtgtcttgcccaaagtaacactacctgttagtggcagagcggaggccacactgagttctttgccccagaccacakgggaaagcagtgttgccatcacaggaggacagaacagktgtggcaaagggaggggatttgctgagctggtcacgaagagggaacaatgttaaggctgagttcaaaaactctgtgccaggtgccttctggggaccagctccaggcacgctgtgtggagactctaagagaaaaccgatgtccccaaccctgcsctcaaaaactcatgctgtgctgygtgaggggaggggaccagcaccaagtgagccattgcctggcccttcaacaggaccgaactgggatgccagaggtcaggaagcatgatgtggggataccagaacagagagggaggggacagatggggaggaggagcagtacttttaaggaatgacggggttctcaatgagcttctgctcattttattagtaccatgaggaaacagtaggaggtcctggaagaagaagggacctccagctggtcccatagcccatgtgggacctaagggtcccagatgctcctgaacacgctgccatccctggtgtgtgcaatgggctgaacttgaccctgtggtcatgctgagcagaggaaagaagccggtggctggcttggggaacacagctgctgtgggcaggggcagagtgcctggggaggtggtctgcaggccacaggatgccttttccaaagcacaggggtgtccgctctgccttcatgctgcagggcctggctgacagctttagcagtgagagcctgtgagcaggggagcccgcagcccgaaggcttctgatcactcgcagtcatgggcagccgagcagctgcttatgactggtcattgccgcccctggtaatgaagacccccttggatcctggaactgtgcttcctcttgtggcmgagcaaccacaggaggcattggagtgagagggtgagcaggcagtgaggtgctcagcacatactccctgctgtcctgtaaggccctcgcactaaggggcttttactctagttagaaagatgaagtcttctgaaggaaatgttttgttcagagctgtgtaaatcagtgttccgttgtgcctcacatgctcagtgccgtgggctgttggagctggaggagtcgggaagattttatggagamgatgggtgtggaaagaaggtggggcttgggagggcagaggggagcaatgaagccacagtgagcacagcctggaggggagagtgtgggtgtctcatgggatgagacccagggctgatgtgcaacgtggagtgttgcctgggttgaggtggcatcttgcagtcatcagttgcttggcaaatgcccactgttttccagtgccaagtrcccactgagcccaggcagctccagggcaccatctrtcaagcaccatgtcccagagtgaaaggaggaaaagaagcatgactcttagctccagctgagctgcaggacagtcagaaggaaagggarcatttgttcctcrtcccttctgatggagtggggcagtaatcttagcaaattaaaaatagtgattaattctaggttgccttaattctttctctatgaagactccctgcttactctagacaatggtgatgtcttgctctctgccttcttttttttttcttactagtgtttttttttgagacagagtctcactctgtcrcccaggctgcagtgcagtggcacgatctcagctcactgcaacctctgcctcccggattcatgccattcttctgcctcagcctcccgagtagctgggactacaggcacccaccaccacgcccagctaattttttatatttttagtrgagatggggtttcaccgtgttagccaggatggtctcgatctcctgaccttgtgatccacccacctcggcctcccaaagtactgggattacaggcatgaggcaccgcatccagcccttcttattagtttttatgatttgtgtttaacaacctcagacaattgctctctggcttcttttggcattttcaccatgtttgttatgtactgtcttgtataaaatttcctcttcaagcggggatactcagaaagctcacacagcatctggctttttattctacactgccatactcaatatatgtttaaaaacatactgggttttgagtgctagccttagctttgtaggacatgtgagtggttgaaaatggtgcacatatctctgaagactggaaagtaatctgtaataatgtaaatgaagttcatctacatgattcttaactgaacagctgttgtgatcatagctaacagcatacacaacgtatgtgccctacgcagtgctaggcatggttccacctgctttcagggaccattacatttaagcttcacactaacctgataaaataggtactgctgttttcccccattatatggatgagggtactgaggcccaaggggacatgaagtgacttgccccaaagtagacacccagctggtaagygaccatgtcatgaytgaaacccagatctgcctagtctgaaactcatccttttaatgcttgagccaaataatggggctaagcatatatgcttgggacagtgagtgaagatgcatgcccwtgtggataaaaacagtaagagtaggctctggagaggagcaggaatgatgagtcttggagggtggggaggattcgggtgggcaaagaagaagggtatcccaggtgataatgagaatgtgcacaaaagcctcaggcacagaacagaagatgctgagatggctcaggtgcctgcacattggtgtcttttagtctatgcctaatccctgacttgagctcaagggtaactcagtggctgtaactcagtggcagcaggtacttcacatgctgcaggaaaagattcttttttgtttyttttttgcaaatgtggccactcatctcttgtcttgctttttttttttttttctccttkggcagctttgacccaaagagagcagtgcagcaactcagagcctgsggggtrttggaracgattcgaatcagtgcagctggctacccatccaggtaactaacgtgcccgccagctgccycctggggctgccctagagcagccagagtttggttccccagggagccctctgtgtaccgtcggccagaaacagrtccttcaaaacggttcccaaacattgaggcccaagcaggatgctgatggaaatgagactctcacrttagcctgaaaaattgggaaggttagcagtcacatcctcttggctgcttttctctaaagtccttttcagatttcagatttttggtgttggtctaagtgatgagctagctagagttgcaargaggatttccccttctctcaattcctaccttgtcccctttaccattcccccaccctttctaacagwaggaaaatatatgtatttaccatcttaactactttttaaattttttcartaggttttttgggggaacaagtggtgtttggttacatgaataagttcttcagtggtgatttctgagatttcggtgcacccatcacccaagcagtatacactgtacctaatgtatagtcttttatccctcaccatcacccccctttcccccaagtcctcaaagttcattgtatcgttcttatgcctttgcrtcctcatagcttagctcccacttatgagtgagaatgtaccatcttttgttttccattcctgagttacttcacttagaataatggtctctaactccatccaggttgctgtgaatgccattattttgttcctttttatggctgagtagtacttcatatatacgtaccacattttctttatccactcattgactgggcgtgtgggctggttccatatttttgcaattgcaaattctgctactattaacatgcctgtgccagtgtctttttcatataacgacttcttttcctctgggtagatacccaatagtgggagtgcagtggcatgatctgggctcactgcaacctctgcctcctgtgttcaagagattcttctgccttagtctcctgtgtagctgggactacaggtgtgcaccaccacatctggctaatttttgtatttttagtaaagatggagttttaccatgctagccaggctagcctcaaactcctgacctcaggtgatccacctgcctcagcttcccaaagtgctaggatgacaggcgtgagccaccatgcctggcccaaatggtagatctactcttagttctttaaggaatatccacactgttttccatagcagttgttctagtttacattcccaccagcagtgtaaaaacattcccttttcaccacatccatgccaacatctattttttgatttttcagttatggccattcttgcaggagtaaggtggtatccccttgtggttttgatttgcatttccctgataattagtgatgttgagcattttttcacatgtttgttggccatttgtatatcttcttttgggaattattttctcatgtccttagcccactttttgacgggatggttttttttyygtgctactttgagttccttgtagattctggacattagtcctttgttggatgtatagattgcaaagattttctcccactccgtgggttgtctgtttactctggtgattatttcttttgctgtgcagaagttttttagtttaagtcccgtctacttatctttgttttcattgtgtttgcttttgggttcttggtcatgaagtcgttgcccaagccaatgtctagaagggttttcccaatgttaccttctagagtttttatggtttcaggtcttagatttaagtctttgatccatcttgagttgatttttgtagagagtaagagatgaggatccagtttcattcttctacatgtggctagccaattatcccagccccatttatcgaatagagtgtcctttacccactttttgtttttgctttgtcaaagatcagttgactgtcagtatttggtcttatttctgggttctcagttctgttccattggtctatacacccgtttttataccaatatcatgctgttttggtgactgtggccttacagtacagtttgaagttgggtaatgtattgtgtccagatttgggttttgttttgttttgttttgtttttttgtttttgctagtcttgctttggcaatgcaggctcttttttggttccatatgattttaggattttttttttttttagttctgtgaagaaatatggtagtattttgatgggaattgcattgaatttgtagatggcttttggcagtatggtcattttcacaatattgattctacccgtccatgagcatgggatgtgtttccatttgtttgtgtcatctatgatttctttcagcaatgttttgttgttttccttgtagaggtctttcacctccttggttaccatcttagccacttctaagtgtacagtttagtggtattaagtacattccttattttgtgctaccatcaccatcatccatctctagaactcttttcatcttgcaaaactgaaactgcggcattaacaatatttccctattctcyctcccccagtccctagcagccacctttctactttctgtaaatctggtgatcccaggaacctcatataattggattaatacagtatttgtccttttgtgagtggcttatttcagttagtataccttcaagcttcatccatgttgaagcgtgtgtcaaaactttcttccttgttaaggctgagtaatattccattgtgtggttataccccattttgcttatccattcattcctcaatagactcctttaacttttgaatatagaatgaaatctgtggtgggaaaataaagtttctttgagttaaaaaataactatcatgctctgatttgccttgcggataagccactgaaccagtccagagcttgttggagctatgccaacattggatcccctctggacacttgcctgaaataggggtgaagggtggctggtgaccccactagctcttgtgaaatcacactgcctaccagcatcatgtagaccaaacatctgccattaattggagctgagctgaacagtgtagcagcccagagcctgtcccactgggaccctctgtcctaacaactcgctcatatcagaaggtggaaggaaccagaagtgggaatggagggatgtgatatgggcctcccctcctccctgtcttctctccacctggcactttcccactgtagtggaggaaccatttcgtatgcagtgattaattacccataaacaacttaaccacaaacaattcctaaatgtttggcctgagaaggaagctgcagatggaattaggaatttacatttgacctggaaagtacaagagctgtcagtaatctgcaacacccgggcagcttttcaaaacccagcgggtcccagcattgttcaggatgaactgctctagctaggttgaaggctgttgttattttcttttcaaccacatctgtccctgcttagaaaaaaggacagagagtgtcctgggcctgcctctcattttttgaccttagggtctgaacacaaatagctaacaactctgttaatgaggtgggccaagcttgtcacctcagatgaaggcctggcactccttttcccagtctaccctgcagtctcctacatyggccttttgatggaggggatggggctcaggcaatgggtgcagtagttcagttttgagttcaaaccactagtctgacaaattagactgcctttcattgcctgcttacaagcccagggttcagatcagacatatcttcatccaatttaagaactagaagaggaccttagggagctgcggagctacttgttttcaaaccatcttccacgggcagctggctgcactcctgctcctggctgcactcctgcttctggctcttgtatctgccagtcttccaggagaggacatacctacagaaaacatttccttatccactgtttctcagaactgtgcactgcaacccatttatgggttaggatatcaattcaatgggttgtgtcaatgaaaagagtcaaactatagaatatttgaagagatttcttctgagccaaatatgaatgaccattggcccatgacgcagccctcaggagatccttagaacatgtgtccaaggtggtcaggccacaacttggtttgatacattttagagagacataaaacatcactcaacacatgtaagatatacaatggtttggttcagacaagtgggacaaccggaaggcgggagcttccaggtcacaggcatattcaaagattttctgattggcaattggtggggatattatcaatagaaaggactgtctgggttatgataaagggtggtggagaccagggttttatcatgcagatgaactctccaggtatcaggcttcagagagaatagattataaatgtttcttatcagatatagagtctgttctattagtaattccaaagggaggagggtataatgaggcatgtgcagctccccattcccagcatggcctgaactagtgtttcaggttaactttggaatgcccctggctgcaaggagggatccattcagatagttggggctttagaattttatttttgttttacggttgtgaccaatatactgtttttgtttttttcatgaaataacttggggtggaaaatgggagagggcaatttgtgggagaaaggacattgtggcatggtcatagttcagtgttatctatagggatgggtgcatcaggatgtaaagcacatgtttacaagtgagacacagacaaggaagtgagctggttaagattaccagcctggttggtggttgagttaggcctagacctgccattcctctgccccaagttatgctgttgctgctgccaagcatcttactgctcgtgtgcaggaagtgttaccatcccagcaaaggtttatcagaggaggaaggggtgaagcaggatcctaagagactgccctctggggccagctccaaacctgagacagtgcaaaactccctcctctttccagcttgtgggagtccagactgcagagctgtggcctgccagaaagctgaaagagcctggtagttgaattcttggactttggagtcaggcctggattcaagtattgactcccacacttcttggctgggtgatcttggagaagtaaattaatctcaatgagcctaggtttccctatccttaaaaagaatgatcatactcacttggtaggttgttgtaaggaattagataatgtatctagagttctcagccagcactggacacttgagcatttagtaagatatttattacttattgggatatgagcaagaagctacctccctatgggtgtaactatctgggtagaatgtgtctatctcagaactttctggtggtatttttgtgaaatcccaacatgtgcggccacctgaaaagagcattctgaaattcccagacctcttcaagcaattagaaagctcagtttaaaaaacatgtaaagaagtctgtcaaaacagactggagctgaatgtcccatgttaaactgttgaggatcactgtacaagaaactgtgggattgcaggtcctcacaaccatcctgtgctgtacagtgcagaggtctggaggtgagcagagagacccaaggtgctcatggaggacttgtcaggtaggaggtgtgaacattaggaccatgtcaagcaggggagaagaaacaagggaagcatgtgacaatgagatattctaaggcaggtggaacctctgggacccccctcagtatataaggggccaccgatttcacaaagaactttttaacagaatgaattgttcaataatagaacaacagactacacaggatgttgcttcaagggtttctccttggagaacgttagggaggagctagaagtccatggatctgacgtggttaaccatagaccatgctcaggcagaggtctatacacatctctgccacctctgattcactggctgagctagcttgaagcctcgctgtgtgaaatcagagtgacagtgtgtgtcgcccacacttctactggtcttgctgtctccatgcaaaatggtcggttttagagggggaagccagtggggagaggattttgcttctaggggctcacatgggttctatgtagaatgagaacagtttctggcctttgtggtgtccttctctcctgggaatctttctcttccacatctcatcctgcaccgagcatctagccctgtgttgcttcctgggagggaatgaaagattcaagtcatgggccctgcccagcagggaagtgatatgagattgaaacagaacaacatataaccagatgcaaggttgtagtgcaagtgcaggaggagctgcaacttcactgaggagttgagacttgagctggactttgaagggtgtagmgactgcctgccaggaarcaacatgatgtctggtgctaggaggcacagtaagttgcagagggcttttctggccgctcactgccctgttcctactgcttactcccctagttgtagcatgctgagagaccaggtgtgattttgcctcatccaggcaacctcatttttagcagctaaaagaatgcatttccccaaagtctttagacccacgtggaaaatggattctcctactgttcattccaccttgctgcgaatccgagctgccagcagagtcaagatgcccacaacccctggcctcttaaggggcagctgatagctgtcttttactgctattctgattgttttggacttttttctagcagatacttacatgtgtatttgtaccacttctttttgtaattacaggtattgtggaaattgtaaggaaggaatgactgtatttctggtatcacaggaactgttctctaattctgtgaattaaatgtgtggaattagatctagaatgctgccttccttatcctcctggcatttgccatcttagcaagttttgctaaagggtcaaagagaggattccctccccaaactgctatttgaaatgttaacttttggaaagaggcactgtgttttgtgtcacttttgttagtactgtattgagctgcagtcgaatcatcctcaccatttaatccagagcctaatccttttcctctcaccacaaccaagccacagcatgtaggatggcatttactttgaggatgagcggtgagagggcaggaagctcttatacctgtaatattttgactcagcaccattgcttaatcttttccatctgccaaccatggtaaccatttggagtgatgtcactgattaaaataataatgctacctaactgcttaatccaggagattggtatatgcctactgtgtctggggataaagcaagtgaggtttagtggatactgtstgcccaacaaggtgttagctactgaaggaaatatacaagtgtaatgtgtgctagcttcagtgtggagttgagcagttattttgttgatgtgactttaggagaccttcataggaccagagggacctgagttgggtgctggataaattgggagttttctacaaaaattctgctctttggctgctgaaaactcaacacagcgaagtgattcagctcatattagcttgtcaagtaaccatacaactttgcacagctgtttccaaaagaaacttcaatggccctctttgattaagggaattacaatttatgccatctccaacagttcccgtgtggaagcagccaaagtgaaggagatggcaaaggaaaagaaaatgcgtcatyccaggactgcagaagcctgtgatgaattatccacagggctgctcccaagagcccgagcagagggctttttcggcagagttcctgcatccagcctaccgatgccctggaagaggaattcttaccccccttccccaaattaataaaatccaccaagccagagagcaggaatgcagcattgcaggacagcagtagctgccgggtgttccctcagcctgccctcgggcttccctataccggtctatttttatcctccctgagaattatggctctctgtgagtctgatttaaaatgaaaatgtgtcactcaatttgaaatgctgtgcagcggctaagaaatatgtccattgttatgcacataaagccctgtgataaatgcactgcccaggaagagaggcttttccacccgtcacccagctcctaggtctcrtgcctgtgcagtcatctgtctccctctccagagagtcagcagctttgtgtcctggagaaattgtgaagcaaatactgcttaccccgaaaagtgtgtgtgtggtggggggaatgtacaaatgttgatattataaaaaaaaaaaaaaaaaaaaactctgcttgaacttgagttctcctccacatcctcccaccttcacttcataaaagtggcactttctgaaaagacttccacttcttcctcaactttcttctccccagtcctgtgaagagtaaatagcataagattggagaactaaagggaagctttagaagcggcctgcttcctctccctatttaatcatggttgartttaaaacagacrcacagttacttcccttgctattaaacatcccacagaggaagaataatagagaactgattttggaatgatatgagtcattatctcaggatctcacagcctttgggtctggctcttttgtgtgagatctgtcttcgttcctttggactggagcctgacccacgggttttcacgcatggctgcacgtcagtcatggggacatactcagcagtctcagaagctgggccccctcagacctattaagtcagagcctgagactgagtcctgaacatctgcattttgacaagtttccccagrtgatttaaaaatgcatcctgccttaaaatcattaccctgaaggcatgtgttgccccctgggtaaactacaagccacttcgtcacatccaagcagtgataggatggagtgggttttcctgtgtcctcactttgtgtctcagctccaactcggagccagtggggaggaattgtgtttccttccctctgcaacaaagttctgcaggcttcagatctagggccactaatggggctgagtctgtrttcccctaggaggcccaggacatagttgggggataaaaggaaaggcaaacatggagtgtttctgatggtgtgagtgctgggtgagcatgtgacaacctttgcactggaacccctccgtgagtttcagagctgaaaacttgtatgtattactttataaaggccacccacaaacctcttatgttttcatcatcttttcaaaatttagatataatttatcwactataaaattcacccctttaaagtatgcaatttcagttattttcattatatacagagttatacaaccatcaccactgtctaatttcagaatgtttttatcaccccaaaaggaaaccctgtgtccattaatagtccccactcccagcccctggcaagcgctaacctactttctatttctatagatttgcctagtttggatttttcatataaatggaatcacataatatgtgtccttttgtgtctggctcttttcackcagggctgttttcaagatgtatccatgcgcagcaaccgtcagtagtttattcctttatattgctgaatattatttcatcagatagatacagcacattttatattatctgttcatcagtggatggatgtttggttgtttctacttttggggaagtaagaatgctgctatgaacacttgtgtacatgtttttgtgtagacacattttttctcttgagggtataccttggagtggaattgttgtgtcatatggtaacactctcctcttctgaggaccttccatattgttttccacagtagctgtaccattttgcattcttaccagcagcgtacatgagggttcccgtttctatgcattctcatcaacatttgttcttgtctgtccttttcattatagctattctggtgggtgtgaagaggtatcttgtgattttgattggcgttttcctgatgactaatgatgttgagcatctttcatgtgcttggccatttgtacatcttctttggagaaatgtctgttgatctcctttgcccattttttttattggattacttgtcttcttgttgagttataggagttataggagttctttatatattaagaatatgagaaccttataagacatacgacttgcaaatattttcttccattctgtgaaccatcttttcacttccttagtagtgttctttgaagcacaaaagcttttaattttgaagaaatctgtttatttctttggttgtgcattaggtgtcattgcattaggttgtgcattgcctaacccaaggtcacaaagactaactaacatctgtgttttcttccaagagttttactgttttaggactttgatccattttgagtgagtttacatgtaagagcccagtctcattcttttgtatgcatttatccatttgtcccaggaccatttgttgaaaggatcacattgaccattgaggaaggcaaggtagacagtgacaatttcatttaagggataaagaaatatacccragaaaagttaagtaatcaggtcaagtcctccagatagaaaagggtagagccaccataccgcatgtccacaggttaaggatgcctgttcctgtgagcctttgagaaggtgtccctctcttctctgattctggcctcttatgtccctttagaaattttgtccatccctagtacacttccaagggaaactcttgtatccagaatcatctatttctctgctgatttgttccttcaaaaaggaaaagaagtgtatgttgcttggtggcataatgaagatgatccatgtctcaatatccagagacagcctgttggtcctggtaggtatgcctcacagcatggccaaacaattctgccccacaaattgctgctggtttccatgtgagaccttgtagggaacaaagtcccactgaggctcataggttcctgtaaggctctttaactagaaaagaagcatatacctcttgcattccacctccatgtgaccaggaatcctccagctaggttgcatgatggtataatggagtacctgaaaggatgggttgacccacctaattctgaccggaagagctctgagggattctttaccattttctaagggaaccttaggttacccatcaggacatctttagggattctttttgtggactgatgtcatagaatttgtgtgacttagggccttatgccgtggtcttactggagggactctagggtttgtctgatccagccagtcccctcatgaggaaacatgcccgagggagaagaagcacaaagtgctgtaactctgcagctccataccatctgtccatattggtccattggggcccttgcaagcaggcatgttgttctgcagaatatttgcacgtgcagatggttaaacccggtgttaggctctgtatgggacctccgttagccaaacaacatcccaaagctactgcgcttcctgcaccattcttagcagccgtgttaccactccctgccttgagcctgaggagctcattacaaggaaacatctttccagactggtgggttctgctgaatgcctgtcctggcccatcccatattggcctttgttactgtctctgatctctccctcttcctaccaggaagcagtcacgggtcctgagcttctcccatacacccagttgtgactccttgaccctgtcagggcgcctgctccccagcaagctagaggcactccaggtgaagaagcccttgattctggaggaagcacaccactgaagtccagaatgctcagccaggcccctgacaagcaagtcagaatccagggagagcagggctgagtaagaattacattcctggagtcactagacttgggatgagggctcttctcccaccattaatgtggaatggaatggaagagaagccaagccaggattgggtgattaggttaaaagacgcctcctggccagtgaaccagagtcacaccgagtggggaaaggcgtctcgatggccatctaatgaggatgggggtcgtgctgtggaggtgatggaagtcgagaaggtgtcctgttcttctggagtaaacgttttacaaacatttgggagcatttttgatgtctcagtgaatggggtcggggataatgatccaaagatgctgcatggtgttaggactgtcccacacccaacggtgctgccccaaagccagtagcaccctctgtgagaaacactggtaggaaaggtttaacgtgttgaatggtcaggagaatacccatttttaaaactgtaattggcaactgagtataaggacaccatgacaataggtgctgtaagggttaaacgtggatcagagacagacttgaaggaggtgcaagtcttgcagaggagctacccctgcatgaacatatccacaacacgaggtggaatgctctctgtcccacagtggactcggaaatagctaaaatgctgtgagagggggagattccgtcatggcagcctcaagaaaccctggacagcctgtggtcttcatgagtgggctgttccagctttaggtgattgcagtgaacacacacccaaaggtccccaccaaatcagaaagcccctttaaaaagttctatttttggaaaaagaatcacaaattctcttgagcttcactttgaagattttcctcttaaaggtgagggagcctttcttgggagagttttatctctgagggtttgttttctcacagaaatccacckaaaggagaattcacatttgatgctgggtccttyggggagcgacatctttacagccmttttcccagaccccatagtgggtactgaactctcttggtccctcctgagggtgtccccaccctcacggccacgaagcgatggtggtgcttctcagtggacggtttgccttcacacaggagctggcatctcctctcccctcagcctctctgcacaccctgtctgtggtacagctgtgtgtgaaggacacctttgtgagaaaaggggaagggagtggcttaggcaggaaacaagagaattccggtctttggaagctttggagctctccatacgccccatctcctgaactccctggctactaaagccctgtggtgcttgtatgaggtgggtgatgttctctccactgtacaggtagcggaggggmggcatccaggctgggactggccccagtcgcactgccggccggcatcagagccaggcttctgtcctcctgttctccaggttcatcctgtactggccttgatgtctttgcagccacagctcctcactctagtaatttccttgagtatggatctgtcagcagtaagaggttttcaaattagaagcatttaaggtttttagcccagctaaatgatgcttcaattatttccccagtgaaattgcaaactcttaaggagaactaaagcaagtgtgtatgcaaataaccatggtgtataatgtgggcagtgccctcagacacacggaaggaaagggcagggcagctttaaagggggagcccgcacctgagcgggtgggtcagcaaagccgaaagagtcaaagatggatggtgagcacagggaccaaggggactcggactctgtgaggccctttttcatatggtttcttccacctgattcttacccaaatccatcttaccccaagataagtgtctatatttaaaacttgggggccgagacaggaagagcctgggagaaattcagccatgctggcgtgtgttaaaacacacatctgatgggcagtttgtcagctctggctctctcttccccagggttccggcattaagttgttcaagtatgggtcagggcttaggagtgttctgaatatttattgtacatgatcaaataattaaaacaatatgtagctaggcaaataaccttaaatgtttccattgttaaagcctcctgtcagagataatcagcaactcaatgggtttggttcacagtctttccactactagagggacaggaaatagtttctgctcggtgagtaaagggcaaagggcagagcaaccctttcccaggccataagacagaggcctcggtgctctaagcgccctgcgcccttccttctgaagggaatccacatggacctgatgagcagggccttgtaaagactcatgagctctgagctgaatacgggctcttgttcccttgtgccactacgtgcgtgacacatgggaccaattaaagagggaatgggcatagagacaaagtaggttagtagttgccaggatctgtgaagaggggagaatagggcagaatagggtgtgatagttgcacaacttcgcaaatatactaacaattattgtacactctaaaggggtatattttacattatgtgagttatagctcaaacttaattttataacggtaaggagccattttacatagaggaaaaaaaaaggaaaagggagagatgtcattttggtatttgctcttatactcaccccttctctgagacccatggctgtgttagacatcttccaccagaccaggaaaagcgtttgcaaaggagcaatgaggagggggaaagacaaggagctcagcctccattttccttctcatcccaggctgctgggaggaacaagtcctcctaggaacccaagggccgcaatgctggaagatctggagctctaagagaacctgctccagagcacggtgtgcccgtactgcccaccatgctgcagctgaatccaaagctgtatgtgatactccacagcactcgtttctttttctttctttcttttcttttttttttttttttttgagacaaggtctctgttactcaggctggagtgcagtggcatgatctcggctcactgcagcctccacctcctggtttcaagtgattctcctgcctcagcctcctgagtagctggtactacaggcatccaccaccatgcccagctaatttttgtacttttagtagagacagggtttcactatgttggccaggctggtcttgaactcctgacctcaagtgatccacccgcctcagtctcccaaagtgctgggattacaggtgtgagccaccacacctggccagacttttaccttgtttctttggacaacatttttaaagggccctcttaaaaggcagaagtgctccaggagaagggatacaatccacttactctcttttaatatctcgaaatgagtgagtttacctgagtatgagacgggagagttccctggccccccatcacagggtgtgctatgggggtgtggctctctgtttgctgctgtaagctcaaaccccttatggaatggggagcaggcagaagggcaggtgcaggaaccggcacaagcccttttgggctctagccccacagcagcatctaggggtgggagcctgcgactcctgaagccccagtgtcacagtgtggttttagctctgccgtcggtggatggcttaagtgttaaccagctcagtgcccacttggtacccaggcccttgtacagggtcctggaagaatcaggtcacacatggacctgaaggatggttgctggggggtggttattgagtggtggaggtggctcttagcgggatggatggggagctggaagcaggggttagagtgggaagatgatcttcccctggagtttggccatccagtggccaaacttctctcccaccacccccaggtgaactcctctcagtgttcagatgctctttctcttctctctttctgtcgtgctgttctgccactgatctgcttgtctctttgtctccttgtctgcctttggagcctggggtttggagtttatatgggtataggatagggggtgtggtgggccaaaaggcaactttttggttgcaaaaacaggaatgcccatcctcatttagggccatgggtatccaggcttgagggtagggcctttgccagggaactgtcctcttctgtccagtatttccctgtctcctgtccatatcaggtagttggacagtcacataaattacttccacgtgaggggtatggacagcacatgcctcggaagatgagagtgggtggggggctgcctgtacacctccactgaggacacagagaaagtggggataggctggactgactttcagagggatgtagagtgaaaattcaaagtctccttagagtagggattgtgctgagtcactacatgactatatgaagaagttgttgaatacctcccaaaaattgaaagaaaaatcagtttcaggagaatgagcatatgtatgaatcgagaccaccttaatgagaaagggacagaccctacctggaaatagcagatttgctcatyggaaagactgcatttgtttaagtagagatcatttcagaggccaaggggaaaacttaaggctttctttaaagattcccctcccacacagaccaaaacagcactcacctacataggtaggggtgttgtaaatgctcttaattatgtgaattgctggacattttctttacagtgggcctgtattactctaataatcagaagaaaaaaatcataagcaaaatctactttggggagaaaaatggttccttctatactgattaaaacataaaccatgttatctctccaggggttaggatacggccacttgttatttgttaatgtacatatttctgcatttaaaaagctgtttacaatgagcagtattctataagaaaaccaacatttgaaaataaagctgtgctctaggtaaggctcctgcttctgaggagtggagcactgcatgcttgggcaatatattagactgttctcatgctgctaataaagacataatcgagactgggtaatttataaagaaaaggagctttaatggactcacagttccacatggctggggaggactcacagtcatggcggaagacaaaggaggagcaaaggaacatcttacatggcggcaggcaagagaatgagaaccaagtgaaaagggaaaccccttgtaaaaccaccagatctcatgagacttattcactaccaccagaacagtatgggggaaaccacacccatgattcagttatctcccactgggtacctccctcgacatgtgagaattatgggaggtacaattcacgatgagatttgggtggggacacagccaaaccatatcaggcataaacttcctgtttagtcctctaagaagtaccttcaaaactcaccttttttccagccctccagccacaattccaagaatcacattcacagtgaaattcttggagggcactggggaggacaaaactcccctgggactgttctttgctgctctragaatgactttgtgccacagtgttgaccccatagggaactgtctgaggtcacgcctggcttttgtgtggccaagaggcaggatgtgtcacctgatgcccctttgctttccctccaggtgggcctaccatgactttttcaaccggtatcgggtgctggtcaagaagagagagctcgccaacacagacaaaaaggccatctgcaggtctgtcctggagaacctcatcaaggtgagccacacagcccagctccaggagaggcctgaccaggtcccctaaagattgagggggtggcgtcgttatctacattttttttttggtcttcatccttcttactgaatctatttctgggatattaatccattttcctacatcagtgactagaaaaaaaagcaacccattctccttatctagagcacttcccaaccttttttacagctcagcaggcatagaaaatggaattctgtggcagcgctcctctcgagggcaccagctgcagggagtctgtcccttgcagacccctgacccagcaatggatgaataaagtatactgacacacagatattctgctctgccagttcagctgagggtctgagccacttacaggctccctgctgagtcctgtaaacagttgtgactgggccctgatcagacttgcatttattcagtaagattagttaacaaaagcttgagtcaacaccactagaggataattgacattgtggacttcccaagtaaaaacgcacttacacaaccgtggtacatcaaaggttagtcttaagattatatgagtaaacaagctatctaggtaaactactctgcctttctttattactattttcatttgtttatctagaggtaaagggatcaggccaccttcagccagatctgttaccaaagttatgcaaacttctaggccttccaagaagatttgtttctataactatctctaacatttttcccaccagcctgactgaactccagcagaattctttgtacagcttgcttgggtttatgatgaggctactgctaactgcaagctgccggctcaggatctctggcttctctagttctcaggggctacatagcacggcccatctggtacacctgggtaagggctctgatgtggagcccaggcctagccctgaagccagcagaggggaaggtagctgctgcatctagctggttgcatcaccagcctcaggccctcccccagatacttgttttaagtaaggcaatagattttatgttttaattgaaacaatttgaactcacacctgacagctgagactggagaactatagaagcggagctattggggccttttgtgaggggcaaatccttaaacatttccatggtgccagacattttggggattacagcagagtatgatcattaatggctcgataaaggttaaattatatcaaaaatcacttgaacaaggtaataaaaataattacctcagaaattttaatttttcaggttttctgttcggaaaatctatccatctggagtagctcattgccagatgatcaggatctaaggtcatgttttattttgtaaatgtgtcgcagccatcttcccagcatcatcttagctgctcaagtctagctatagacactgcagaatattatagtaaatgtaygcatagctttaaatttgcctttttaaaaagagagcctaaatactagcccaccttgccatgccatctttttttttttttwaaacagggtaagggggtaacaggctggttaatcaagggctatagttagctggactccrgttgattgaggtttttgctgtggtccacctatcagtgtccacattttaacatcttactttttatggacaagaaaaatctctgttaaaggtcagctgatttcagggcctgcaagtagcccactctgccatgtggctgccttctcatttgtctaggatcatagtttccctcttctgttccttcgctggatttctccaggattaccaccaagacctctgattcccaaagagggaactctggaggggacccggatcagactggctgagtcggcccccacactgggctctcctccagttaatgggaccacatgccactgcctggggctgctgctgtgatgtgctcaggacactgggcctttcctggcacagctgcctcttctcttcactgacggggagcctgcctgcttctcagtgctcggcttcagtgcagcttctccctcctgcttcccatggtctagcatgtggcacttcatgtcactcttagagcccatagcatgctgacctatgttccagatgtgtttgtcctttttcgtagaggacagtgtctttatgtttacaccacctccttagttatgagtgctgagcctaatacgcagggggagcctacctaatatttatggaacaaatgaaaaaacaagtgacttgcctaaagaaaaagtataggaatacatgctgtttcctctgcctgcaatgctttttcccctcttttgcctgcctgacaaagtggtattcttccaaactgagctctgaaatacctcctagcctcccagatgttgttagctactccatcttctatgggccagcagcactcacctcctcccttcctttattgtgttcatccccttatgttgtaattgagggcttgtcatttcaccagactgtgaacacataaatgacaagggtcctgttgtggctgtgttcctagcacaattcctggttgtcacaggaatacatgagttggtgcagctggckggggaactagccaagagctgctcatgactagaaacctgccagtaatggctcatcctatgaggaatatacagaaatcaccctcattttacagatgaggaaactgaggcacagaaagctgatataaattgcccaaggttgcctaggtggactgattctaactcccgctgtctaaactacattgccctctgatccagtctgattgagtaatgtcactgagtgcagttatccttcctggagactgaatagagacactaatgctaaagatttcyctggggtcttctatttcctcctttttatttttctcctcttcttgggccacatctggacacccatacttctcatgctgagtgacctgggactttgtatcgagaaactaagacttgacagagctgcgtgttaacttagaggggcacatgccagttccccaccctgtcccaagcaagttctaagtacgttttagaacagaacgatgagaagtggggacaaaggtggcctgcagggcaggcaccaggcacttaaagaccaccttcctggaggggcagcctggggctgggggctgcttcgttaggctgtcagtgaggttttaataaattgttgtggttgtttaggggagaaaagtggattctggtggcctctcccctgcaaggattttaggaatagcccctatcattcttaacctgaatttgtttattctttaactccacagatacatactgaattctttgtactctaatctggaggggttagtgtgagggttataaaaagagtgcattacatggaccctactctccagaattaataatagtctaatgtaacgatggccataactgtagaggaccacatcacggagactggctgtcgtgcaagcctgaatcttcatcacagtggcgaaggagtgtattaacaaacatctgcagggagccaacggagcacaaggatgtgtgtgagcactgtgtagaggagacagtgtcacgaaaggggatgctgcagttggagacttggggcctgggagacccagatctggggttatcctttgatatttgctcaagtcaccttgagcaagtcacttcactactctaggcttcagttttatcatctgtgaagtaaaaggagtggcttggaatggattgctaagtttgctttcagcccctgcagtctgactcttggagaaaggttctcaaaagatgattgatcgaytgatcagtcaacagtcagttctaagggttagaggaagcagatctgggtgggagatgttctggagacacacagggtgaggacagtatggagatgaggctgatgggtgtctcagtggagcaggtgagaccctcagagaaatccttgttcagaaaaagtggccttgcagagcatatcatcccttcctgttttttttccgaaatarggaatgaagcgcaggtactgttgttgcttggatgcggtagacagcccccagcctctggctctgcttaagctggaggacccaggcttgttccctgactcaggggcttagctaccgtgctttggcttcctaacccctcctggctgagccatggagcctccccaagcagggcagagatcaaagcagggccgtggctgcctcaaagctcccaagtcccatccagcccctgttcctctcagcatgagctgaaggcccagtgggtgcatggctctgagcagacacagggaggagagccaggcccagagcccactcttgccagcttcacgagcagcctggcccaggccggggactcagtcagtgacactcaagctggaagctctgctgcaagctcagccttagctcaggcaggacagccttccctgtgtgtggaacccgactcctagtaacccaatagggcttaacctatgaagaatgatgattcagcatttttcagggccatttgccaacatgaaatgcaatgttgtgtgtgtattttccttggacttggctcattccttcstttctcattatggtcttcatgccagtgagcaaaatgagayggcagttgatttacaaagagctctgtcatcatgggttactctcccagtgctctgtcccaggcttgtccacaggaaccctgctgggttgtctttcctcatccaaaggggtgagcccagggaagggcaactaattttaacctaatggatgtaattaagacagtaattacaggtscaaaacaatctcatagttttatttgggggttatttgcatcctgtaattatgcatacaactgtgtggccatttgaggataatctttttaaaatgttgatcagatcaggtcatttccttgctcaaagcttgcctgtggctctcaccccaattttatgctgcaacctacgaggcctttggtgattggctcctcccaccaatcaccttcagttcccccagctagccatcctggctctcctgatcctcagatatacccagcagttgcaccactggacataggcatccactctgcccttctcctggaactttcctccttccttcttttctgtggttgcctccttcagctcatttaggtctttgctcagctgtcacctccacagagctgccttccttgagcatcctttttgaacatccccatcccacgctcaccagccaccagtttgttttcttcataatcctcaccattctctgaaaacggaaagcatctttatttgcttgtctgtctgccctcaccatgatgtcagttccttgagggcaggcgtcttgttcactgccatgttctagagtctggcccgtagtagggtcttggggtctgttaagcaaatgctgagactttgtgtccatctacagagaggggtgcatgaagtctggccaggggattctgcatgggaagaacaagggtggtatgggccatgttatttctctgctcactggtgaccaaccagatcccctccctaccttgtaaaggaccccgacaagttccagtttggccgcaccaagatcttctttcgagcaggccaggtggcctacctggagaagctgcgggctgacaagttccggacagccaccatcatgatccagaaaactgtccggggatggctgcagaasgtgaaatatcacaggctgaagggggctaccttaaccctgcagaggtactgccggggacacctggcccgcaggtgagccagactgtggcagctcagggcagcagatcatggtggggaagatgggggtctgcctttctcagctacttggcttctctcttcctctgtgctgagagtggttcctrttggggccatgtctgcatcttggcttttcctcggcagctgggcctatccctataatcaatgccttctcacctcagggggtaggtctagtttccacatctcctggtttccccaggctccctccatcctaccagcattagaaccagctggttttgccacaaaccaaccatttcccctttgcctgaaccccaaagtaaaaaactaactccttttaggaaaagagaccaatacagcctggcacagttaacctgtgcttggcctcattacttattccacagatttcataatgcctcggagtcaggtgattagggctgcaaaggtcctgggaggccccttttgcgagttactgcacaagccaggatggagagagagtggcttgtctaagcaggagtgttgacctaggggttgagtcaggatgccaatcagcctcccctgcctgcccccagctcgaccccgagcagaagaaactactgcagggttccttcctcacggacactgggctgatgaggcactacagcagcaggagtgtgtcagccaagacaggctgaagacagcctgccctctgaccctaccctcggttgttaggttttgagcccaggcctggttcaagtccagtgccctctccagaaaggaatttccttagagaagtgacaataatygccacaaagtcttgtgtttggaggccaaacagagagctagactagggaatcagatgcatttcagcaaacaggtgacacatgggctgagtgggtcactttctcctttgaggctttgctgaatgatttccaaggtcttttttagcatttcacactgagtctctaattgagcacttgttataggcctggcagcaaacaagacccttcagaaggggaggaagtgttagactggctttatctgggaggtgagatgggaaggcagaaaggcaagagaggagaggaaatggccacattccatgcatcccgagcagaaagggttgaggagataaaggaaacagagattggtctgggcctgagaaggtttagtcattcagcaaacacttacccagtgcctacagtgggtccaggatgatggagacacagcccctgggatctccaagcctggggaggtacagaggacaggcagcaatgtgaacacatgatgtagaatgctactggtgaagtagttgaggactgcccaggcacagtgaggtagaagagtgctcagataaggatcatagaggaagtcagactctgactgagtttgaagcttgtgggaagcctttcgagaccataaggaaagaactaacactgcttttctagccacaacgtcaaatgcctaaggcattgctacatttgttaggggtgaagagagttggtttcccctgggtgtgtccaggtagggccacagagggagaggtttgcatttgcagatgtctcagggttctctgcatcagggcggtcaatactctctccctgacactgcctgttycctcttgctscccaggctggctgagcacctgcggaggatcagagcggctgtggtgctccagaaacattaccgcatgcagagggcccgccaggcctaccagagggtccgcagagctgccgttgttatccaggccttcacccgggccatgtttgtgcggagaacctaccgccaggtgagtagccactctgagggcctcagggctgcagattcagaactaaagtggcaacagatgaattactgccaacgtgaacctctgtcaagcactcccaacttttttctaaatgctttcacatctctgctctcaccaaatcctttctgaagtcccacaaggtaggaagggtgtgcatactgttgtcttagtccattaaatgttgctataacaatatctgaggctgggtgatttatgaagaaaagaggtttatttggctcacaattctggtggccagaaagttcacaattgaacatctgcttctggagagggcctcaggctgcttccactcatggtgggaggtggaagccggtgtgtgcagaggtcgcatggtgagagaggaagcacaagagtggctcttttaacaagcagctctaatgagaactaacagtgagaaatcacccttgaagaagggcatttatttgttcatgagggatctgcctctatgactcaaacatctcctgttagactccatctccaacataggggatcagatttcaacatgagttttgaaggggcccagcatccaatcatggcagttttcacaccccttctgatacctgagttgctcagagaagccaggtcacctgcctgagggcccaggccagccaacagcagggccaggtgacccacctagggctcattcacacttgagggcaggcggtggtattgggcatcatcaggtctaactcctccacttaacggatcaggagcttgaagcccaacatggtgaggtcaggagggaggccccgacctcttccctgccaggttcttgctctttgtgttgttccagtgaagccaaaacccttgggttcaggagccccacatcaggacacatctgttcaaccaggtaacaccaacacatctgaagcacagagctgacttgaaacacgaattggaaggaaatgtctaaaatggttttctttttcattaaatgaacatctgtctcttctatgatcacagaaggtgtgattttctaaataataaaagtaaagcacgaaattgataataataaaaatgtggtcagggtggagcacaccctggtgtagtatgtagagaaacccaggccattgggagaaggttctgtgagtgttcttgggtgatgggtggcgttggtgtgctgctcccatggaaggggcaggtgatgtttgggagtttctcagcaggggcagcatgtgcaaagagtgagcactgatgtggctcccagctctgtcactcatggctgtggcactgttcattgctcagcctgtttgcttgtttactcatttattccacaaacatttattttaccaggtattagggcgagcacactgatgatgctttcatatcctgagtggttttttaacttggtagaaaaaaaaaaacagtgaattacacaccaagtttgtaattataagccattagcctgctgtggacactcactgaagtatctcacttccagctcagtgccaccaggaggggacctccacctggtaaatgggtagagagcaagtggatgatcattaggcccctacaaccttgaggttttcagactgtggtttcctaacccataaaacaaaaagtaaaacaaagctgaaaagagtttgacagctgattccctgtggatatgtaggcgcagaacctcgctgaaatgtgttataaaacaaccaccaaagccttagatcttagggggcacattgtctgtgtaactcctagaaccaaggctgccctggcctcttccctccacaggcagtgatgtatgcttccttcactcctgtcctgcagtgcaaacccacaagatgtgtatccttgtttcccgccaggtcctcatggagcacaaggccaccaccatccagaagcacgtgcggggctggatggcacgcaggcacttccagcggctgcgggatgcagccattgtcatccagtgtgccttccggatgctcaaggccaggcgggagctgaaggccctcaggattgaggcccgctcagcagagcatctgaaacrtctcaacgtgggcatggagaacaaggtggtccagctgcagcggaagatcgatgagcaggtcagtgtctgcagctccctacctgggtgtcgggggcttgggtactggagcattttgagagagcccacagcttccttgaggaactgcacatgccgaagacccgagggagcacagacgtcctcagaccacagcagatactaactgtggcaggcagatcagtgacccctaaagataccctcagccctgggatctgtgagtgtgttaccttatatggcaaaagggactttgcagatgcaattaaattaagaactgtaggatgggaagagtatcctgggtgagccaggtgagcttgatataatcacaggggtcctcctaagagggaggctggaggatcaagttcagagaagaagtgatgacagaatcagaggtgggagggatgcaggcagccttgagaagccagagaagacgaagacatggactctcccctagagcgtccagaaagaatgcagccgtgccaaccccttcagactcctgacctccagagctgtaagataatgatttatgctatcttgagtcataacttggtggtaacttgttgcagcagcaataggaaactgacacactagcccaaggtgctggtgttttgcccttgcaggggtgacatagggtaatgcagcagcagctggtgtgcatggagggcttgctgtgtggggtatggggctggcgctttgactggagtagcttgtctaatatagcggccctcctacggcaagtattaccatccccctttttgtacaattgaagacactggaagggcacatggcatcctaaagtcacacaggtggcagtggcagggccgaggtttgaaccccagctgtctggctccagagcccatgctctgcatcactttgcccttctgyctctctgtctgcctatctgtctgtctgcctcttttggaaagagtgtttgctttggaaatcagaattcagttcttctgcttaaaagttgagtggctgatgtgactactctgaacctcttttcttatccataaaatggggctgacagggctgaaagaagaataaatggtctaatgcatatgcagggcctggtatgcagtaggagaaacttgaaaaatggttagcactcttatttttaagctttgtcctctttctaccctggccaccttcccatgtcagccaatcaaaggggtaacaagccattgattaaatatccctgtagggggttgggtaccgtacaacgtagtacaagagattcgagacaagcacagaacactcagctttgtctaatggaatagacgaggctcacatgtatgcatgcacaaacctggacccccactttttggtggcccacatggccagtcctccttcccttcagaagacctttattggatgcctggctgtttcaggtgctttgctggccttgctggacagaggatggctgtgacgtatgtcgcatgctgtatcataagggaggaaatcgcatgccaacaggctgaacagcattgatcctaaggattttccaagcacctgccatgtgccaagctctgcgatatgtgttttgtgttcactcttatttgatcttcatacaattttgtgagatcattttgtatatgaggaaatggtgggccarggacatcaagtcccttgccaaagtcacataaatagaaagtgctgggaccaggatcctacccgagctctgatcccacagccataatgggggcattgcgggttttttaaccccaaacattactgaagggtttcagtcctttcccgtgcatgcctactgctgcgtttggctcccagagttgaatggaggcccactgttactttgtccatgcagggtgtagaggtggccacagaaccaggcttctgaggtgccccagagggtgcctcctagggaaggaaaggacatgaagagtgtgtgtggcatggagaaacagaattttagagtgggtatggctttgtaagtcattgggatttaatgtatctattctatactgggcatttttaaagcttctcatgacccagtagggcaggaaaaaagcattttacacctaagccagctgccctgaacaggagcccaaaagtggtgcagagatagcaatagaatgcctctgtttccgtgctcttgcaaaagacaaggctttctgagaagagactgtcactgggtgtttctctgtgttagttctacagggtgccttgtttggcttggctccttactggggaagcaaagcagagagcccaggcacagggtgggcacagggcttgtgcctgcccctggtcagcctgctgtgatacaccaggtcagggaggagggcacatccactcagagggaaaagagtgcaaaggaaaaggtctgctgtctggcactggccctttgaaaaacacaagcacaaagcatgccaaggtggcagtggctattgtggctgttgacaggaagaaaagacttgcttagtcaaatgttgtgagttaaccttccagccagagtgcagtctcagggatgagtaggcattgaccgctgcaccctgctgggagccctgtgtacatgctggctcccccaggccttgctttccagccttggggctctgcattggcattgctgatttctaaagttaacttgagaggataaaaataaatctagcattttacaatccacgtgcttgaaaaatcaaagaaaagcagatttaaatggcctatttaaaaaaaaaaataaaaaaagctttttgccttaagcttcctgcttggcaaacatctgtgagtggtggcaggtgttagctaccctgggcaggatgccctgtgtgtagagggtgatcagaaaagacgggaggagtggataagctcttgctttcttgtgcccttgcctgcactacctgactaggcacgctgtgctcttctcacgtattaactcatttaatccccaccagaaccctaggagataaacattaatattattcccattttaaggatgaagaaactgaggcacacagaggttaagtagcttgactgaggtcacacagctagtaagtagcatggctgggattgaaacctgtcaggctggtttcagggtatgttctgccacctctgaccaagctataagatatttagctattgggagactcttggaacatgtcaggagaactcctcagtccaagggagactcttagccttagtttgggttcatgctcatacagatagcattgtccttgcttgggaccggctggcatttaaagtggggagtgtgacccagtgtcaaataacatgcttgacactctgttacaagaggaagcattgacataatctccattagagctctatataggggcttgtttcattgcaatctcttagcagatggggccagctgtttgcaagtgaattttttttttcctataattcctggagacaacttaggcagtggtcctctggtcacacaaggtttctaagccagaaggggaggatctgcgaacaccaaggacaccacaggtgaaggtgtcccaaggtatttgtgagaacagcatagggagtagacagagtgcccactggacagaggcctgggttctgtctcagttgtattcacaaccagagctgatagcttggaaatgattggggctttagttcttccaaggggattcgcctgagatctctaaggtaacatctagctcaaaaattcactgataaccatgatctggctagagtagggttcctatccccagactgtgctctagaatcccctggggagcttttttctaaaaatgtatcctcactgccaagaagtcagtaagggaggaaacaaagataaaaccagggtaaggctagcacccaacattcatatcctaaggccttgtacacccacctggaaagaaaagatgcaaatttggcaccaagtttctatgcaarcagtaacaggaagaaaactgagtggcttgagagttcttaatagaaaagaaccatgcagttcaagaggatttggagctgtccgtggtgctgacttgtttttcctgtgggctttcataatctgtgacgtgacaagccacatccttcaccatatcctacggtgatatatacaatgctggttcttgagaccatttcttgcagtgtccctgggataggctgtggtatgacgtcattcagtaaaacgatgtagtccgtgaactcggctctctgccagcctaactttagtcaagcacacatttagagttggccagtttaacttacaatttatttataatgagagtaaagttccttagacacttatgaatataaggttatccttaaatatattttatatgagaaatatgacacaaatatatggagtcagtagccttttaaatcaatttgattccatatacttagtagtcactttgtaaatatgttaaattcgttatatgtaatcatgcatatatgtcatatacagtcatgcatctgttaatgacaggggtaccttatgagaaatgcatcgttaggtgagtttgtagttgtgtgaacatcatagatttcgcttacacaaacctagatggtgtagcctgctacacacctaggctatgtggcatagcctattgttcctaggctacaaacctgtacagcatgttactgtactgaatatcataggcaggtgtaacacaatgatatttgtgtatctaaacgtatctaaacatagagaagggataataaaaatatggtgtaaaagatggcacacccgtatagggcacttaccatgaatggggcttgcaggcctggaagatgtgtagggtgagtgaatgtgaaggtccaggacattactttccactcctgtagactttataaactgtccactcctatcgactttataaactgtccactcctgtagactttataagccgtacacttaggctacactaagcttactagaaaattgcttttcttcaataattaaccttggagtactgtaatatttttactttataaataatacttttaacttgtggcttctttgtaataaggcttagcttaaaacacaaacatgtacaactctacaaaaattttttatttcttgatatccttattctgtaagcttttttctatttttaaaatttatttttggggtatcccattcttcatgatgtgcttatttcacattgcatatctatcaaaacattttatataccccatacatatacacacctactatgtacccaggaaaattaaaaattaagtttaaaaatttttttttacttttttttgttaaaaactaagacacggatacattcattagcctagacacacacaaggtcaggatcgtcagtatcactgccttccacctccatatcttgttccactggaaggtcttcagggcagtaacatggcagggagggtttctggggtctccgagggtgtgggcaccccatgccctgccctctgccaggcttggctgcatggctgtgacacctgcaggtgcaaggacgagccttctggggcctgtccttctgaagtcagatgtccagaacagaaaatgcaccgcctccacaagcccccagtgacaatatctggatgcccatgaaaagacataggagctccccacccacaccccagacagccagagactcgggcaactctccagggttctccatagagaacttgaacaaggaagatagctgatgtttactgagcccctagcaaagtactttatctccctaatcttgataaccaccctctgaggcaggagttactattatattcctgttttacacatgaggacactggggcacagaaaggttggttgattaggttggatgtacacagctgatcaaggatagagctgggatctgagcacatgtctgtccagctccagccactcaactccctgacatccctgagccaggtctcaggcggtgtcaagatcaatgcagctgggcctcctggatacatcatacttcgcattagagtcctgaggtgccatctttgtcaatagcaggataggatgtgcctcctgttaccatgcgtgcctctcttcatactccaacaagctctacctagagacctcctgcctagttatccttccactcctagtgatttgacccaggctgtgccatctagagagagcagctgggccaaacctcatgtccagcccagagcagagatgaagtcagagggtggctactccagcatgtgttccctccctgtgccctactcctctgtgcagagaccctcagcctccagtggagacccagactggagtggataatacagacgtgcattcggtgttcaaatagaatctgcttgattggatttcttctttgtgatgccttagatcaaggctgcaggcagascaggcttgaaggtgtgtcaggttgtaactgggaggttcccacagagtgctggggagcgggtagcatgtctcattctgttgtgttggtgcaggaaatggactggtggcttgtgcattgccgtactggtcacaaccacaaggccccacagcatctgtggcattttacagggtccaagggcttttcttttgctgctcttcactgttttctgtgaagtttaatttcttatgtgaattagtcattgattcctgatgctccagcttatcggtgatttggccgctagctctgttctgcctggcgctcctacagaccagagcaatgaagaataatcaatgaccattgttgcctgcttgatgatttggagagccctatttcttcctctccactttcctcactgaccactcttagctaatgccctcaactcttgcggtgctgatttcttcccataatttgcagtagcacttgataccagcaatagcttcttagggctctgggcccatgggggctgtttcacacctgtgtgttgcctgagtgggctgggattgagtatcccatctgcaggagcatggtttgggcagggtgggtcagggcatcagttccctgagtcttagagtcttatggggcaagccrtggctgacaggggtgagagagattccaagaccccatggagggcctccttggaagagaggatgctgaaggggtcctttgtctcaaagccagcgattagattgcarctctttgtgctggcaagtccacaggcaggagggctctgtatgaaagagcaaagaaacctaaaaagtgaaggctgcaaacccagagagccagcttctttgtttctgcaacttaaaaataaggtataggatccacccagccataaagccacctgctaccaggcagcttccagctctgcacatgctcacgaaagctccttgagctctttgaatgtcagtgttgctgttctttgttttcctctatttctgtaagtttacattagtgttttgttagggagatgccaggcaagcacttgagcatgcaatgattgtgagacttaatcctaccttggaagttccttttttgattgccttcatgctttttccctggtaaaataaccttttcttcccccacttcttctcccttctccttgtttgctgatgttctccacagaacaaagagttcargacactttcagagcagttgtccgtgaccacctcaacatacaccatggaggtagagcggctgaagaaggagctggtgcactaccagcagagcccaggtgaggacaccagcctcaggctgcaggaggaggtggagagcctgcgcacagagctgcagagggcccactcrgagcgcaagwtcttggaggacgcccacagcagggagaaagatgagctgaggaaggtatgctcaggccagaggggcaggcgctggcaagcagagtgggtgggcacacggagccacctctcagagagcactgctgcttcaagtggtaaaattgccatggtcttgggctcatgtgcacagactgaccattcatctgtgtctagacagaaagtggcatgctttggggaaacccacacaagcatgactgcgcttctgctgttagctggacactatggcatcccctgggaggggcacatggtgtctgcctgtgagcattgtttttatggtctagaattaggcccagggctggctctgtggcccgcatccttgttggcaagaaagccgtgacagaggctggggctgatcttgatgctgcctgcaggggagggcagcttctgggcacccytgcccatgatgcagcactgtgctttggtggaggtgcctcacctttgaacacttaaagtctcagcctgtcacacccaccctggtgggcttatttcttacaccatgaaatagaacttcctgagctttgccccaaacctgagyatcagggcatagagattccctgctccactgccaagataactgttccagccagggaagtcccaagggcccctggagasccccccacagacttgggtcattgctgttytgcctcccaccaccgccccmcctcccaccaccatctctacaagccacaagggaaatagcatgttgcccgctttttcagtgtttgtccatcaatggggagtygcagtggatggggatctaagagggagagatccagtgttcagggtgttggagtaacaacttcaaaattggggcaggctggatgctgctgcaggaagggccctgcggtagaccttggagtccccagattcccatccccactctgccattcccaagcatgtgcagaaagcctcactggccttagttccctcatctgtgtgtatatttataaaagttggttcagatcatctccaaggccccttctagacttgcacctggctgccwccatgagattgtgtttggcttctggaaggagcagaggcccttggccctaygtgggagtccttctctcttctatttcccmctgccttttcctggcctgagccttcacatgcagctgaggaacacacagacatccgtggaggttatagagcctacagtgccagcatgtgctgggcttgcatagatcttcttcccacctcgggcctcagcaccatcagctcctgccttcacccagaccccagggatctccaggggccagaggtgggatccaggtgtggagattaagggaagaagaaagtaagacgcaggcttcccataaaaggccacrctcctgatgtgctgctttgagggccctctgcccacaggaccctctgcccagataagtcacctgccagcctgcccaccatgagacatgaagtggattcattctttgggagaaagcacgtggtgcttggaaactcctgttaaatgtgtctacaagtcttgtaacctacaaatcatggaatwccacacttgtggtttgtctacccttgggagcagatgaatgggatggtgacctttctacrtgaataaaaaccagaaggtgaggtccaaagccagaaaggatcaagaatagaactggaaactcctgagactagtgaccctgggagaraaaacattccctgcatgtgtgtcccagtcagatgagacatctgcaaagtctgtttacccagcagatccacaaaatcaggtctcacctatctctgycccaacagatagcacttgactcatcagcttcccagccccgcgtccctgcttcctgctaaatgctacaacttgggracttcagcactctaaacacccaagtctccatcaaagggagtgcataagagtttataatatgaaaatcttcattggaggagcaaaacagagaagcagactccctcctcctctccttaagaaatgttgctactcttccctagcaatgatatgctgacctaggtcttaaagaaaattagagcttggaattggtaacaaaaaattaaggacgctgcaaggaggggaacgctaggagcagagtagtgcaaaagccccttccctaccccaaatgtaagcaaattccaacttagaaacactcagaaaccaacaggagatgactcatgaagtggcatgtccacctctttcctggaaaagaaaaagtggaagcaaacattctttagaatcttcagaatctttttgttgtggtggttggaggtaggtagatgagctggctggcttttttttgttttgtcttctgtgcctcctcagggtataatatttatcaaaggcactgtgtcaatttcaataaatgctgagtaatcagacaattggtttcctccaaggcttgagcaggggcctgctctgctttgagcgagattgatgagaccagccaagcacagtgagggggccgactgctagtagatgtttaatgagtttgatatttccatcagcaaaggcagcgagtgtcgtattggaactgctatgctggaaaactctgggcttgccatctctgacgatattaattggtgggccacgtggctgccctgccttggcctgtgggaggccaagtctcccygagggcaggaattcatctctctgtccacagagtccagagcagctctgtcgcataggttagatgrcatccttttctactaaaggtatctgttgttttggcgcttccayggggtagtccacacccaggcccttakcctccttcccttttagcctgtgcattgtgtacatttcrttctttttgaaagcttcagcgatccctatgccggctgcttttgtacagctgtgctgttttgcatggctgctctgtttggtgaaagagaggtggcccccagggctgccctaggcacagaggtgacagctcattattcagaatctgctctgaaggctgctcaatgggaccasagcaaggcttagcttggtgcagggctgtggtgggtgaggaggarccacccacagccaggtgcctggctctcagagggggtccctggtccttgtgagagatgactagcaggcccccaggcactgarcattcggactagtggggctgggttgtgcattgtatcaagacatcagtcatagaaccactagccactagttgattgccttgggtagttcaagttataaaggttttgatttctccaaatagaggtagagagatctggcttggggaatgggggctctcatagcagagtgtgttgagccttctccccaaaggtgtggagcagagctactttgaccagccaagagggggttgtgctctcagcagcaccaggactcatggttcatgtggaggctgaggattattaggaaggggacactgacccatctstggaaggacgttgtcttgctgcagaaagcacagaagmtcatggtccttcattcagcaggtgtttgaatgcctgtatgtgttagaccctgttctacacactggggcaaaaggtgaatggtgtttgaaaaaacccttctcrttsttaaggagcttaaatgtgtggggatgggggaagaaagtacagagaggaatctaaygtgaattaccccccaagggctacaaacaacaatgaagcagagtaaaggggatggagggygacctgtgggggcctgaggggtatgatttcacttttgatggccacagaaggtctttctgagaagacatctgagtaaggggagaarataagccaaggcgatttggggataacaggtgacaggtgtggcacacgtgcacaggccttggggcatgagtaggctgggtgggtgtgaggaccaatgaggtgctcactgggctcaggtggagtaagtgagraggcaaacagcaggagcacagtgcggccaggtcaggaaggatcttctgacttcaagcgcggccttgacccatgaaacctccagagagatgagcaactctgtcctaggcacttcagcttctgtgagcttaggggtgagagaggaattaaaacacatctgcaggaccattttgaagatattttagccattgtttcaaagttgtcttactatccaagggatgttgattttcaacttttgctttaatcactactttaaaaaacaaatttatactatgcttacttagaagaacattctcagaaaatggtcaaataaacacttcaagattttgcagaattaaaggtattgtccctacctagggctgtgcctgtaaatgtggtaactgcacagcatcaaggacagatggcagaggaaccttttctgattggcattgtccaaccagttttcccatgtttgctactagaaaccttgcgctgggtcttcttatagtactaatatccctcttgaaaacataagacaaaacaaagcccctagctacatttgtatccccaaagacaaactagtaaagacagttctttagcatgttgctggggcatttacttaacttaatataggtactgtattagcctcatagatacaggattttcctccagtgttgattctgataagctgtcccaaataagcttttagaagaaacactgagtaatgttgcctgcaagagttaagactaaccactcccccagtccaaaaaaaggagctgctgaatggtgttgaatgagtcctgaaacctaaggtgttatttatcatgctcaggggatgcagccrcctgttttatgttgttaaagcrtctcccactgcaccctgcagccctgacaccacaaagtgggggccatttggctgcagaagtttgttacctgctgtgtctgccaacagctgtgttagctggctggraagactggggttggctggtacctggagaaatatgatcaaggaagcattctctcacccacctggggtgtggagctgagtgtgggattggtcctttcctgctgttcatgaaagatcaggaacatgggyctacctccaaaattgtttaggcaagcaagaaaagyaaatccccctgaggccactttaatgtatggcttagaataataaagccaagtcagagacctgcattcatgaatcaaagagsgagamagagggaagmaacaagcctcaaaacrataggaggtgtaggtggcatacatgctgttaaccatggcactcccagactgtagccttggctcaggttttagatcataggttgttgcaatgaagtcacatgttcttaggtggcattcataggactggagatttcaggacccacttggtgatgatgtcatgcrctctgtgctggtcagatggcatgttccatttcagagggatattgactgtgtgtagratgctcaaaggatggcgaggggtcttggtcttctcaggtgacctactgctctgtgagccatctagatattaggagaatgttaaggrgaagcaaagttttgctccatgrtaaggtctggttacttcacagcctgctgtaaaacctaccagtagttgactgattcagaggrtacagccttgttcctggcaggatggggcaagacccctgccttcctaactgtgacatagatcatgcttcattgcaccaccctaggctttattctgtagaagtacataccatgtggtttctcctgttgggttgttttcagtttgattttacttgtatgtctagaaaagtgaaatctattttgataatttgccaacctaatttaaaggtgctcctgaagtcattgagtgaactgcctccagcaatagcaaattagatgcatttgaagagtgttttcctacattgtatgtgctgcctaaattraattatttgattaaacaagctcatgtattctagatattttggtcaactataaacacatttatttaaaaaaacaattttaaagggagcccttagttgtgactgagggaatgcaggctccttaacttggtctgcagggcccttctattcatttgataagctttcaggtgctggcggtggcctgggttctgagggtgtgatagtctggcgatataatccctaggtccrcgttgaggactctggtccaggctgagcaggcaggtgtatgaggaagcattgctgtcccacaggctctggagggatgtgcaggccctgtcagagcagracaccaagcgtgggggcaaccccaccaccccgtgtggtacaggaatgtttcccaggagagtgccggtcaagagctaataatgagaagaaagtaaccagtaaagaatgggaacgacagagcctgtcagaaggaacagtgaaacattcaggcagatcctggagggcgggaagaggctggggagaggagctgggcccacccaggtcgagttaggagaataagaggagttcagtgtttcctgaggacaaaggaagagaagccattcacaagctgattctycctccctctacctacccagccttgacttttctcagtgcccgtgctgcaaccacacgttttggcaacgtagaactcttcacmttcccaaacccgtgcccttcctcctcccagacctttaggcayttgttcttcccacctagaatggccctcagctgcctgagacatcccacttgcaggcctaatccagatgacccccacctcttgtgaagccttcatggaccctgaggctaccttcttttccttctgaatcaccttattgtagtgattctcawtcggggtgattttgccattaggggacgwatggcagtgcctggagacattctggttttcacaaattgaaggtgagaggagggtgtgttgtattagcatctagtgggtagaagccagggatgctgctgaacacccagtaatgcacaggagagtcccytactcccccaagaaagaattgtccagcccagaatgttgacagtgtcaaggctgaaaaactttgctttataggaagctgctacagcccttattgatatcattactatgtatgcacctgtccctcatccctgccaggctggacactctctgagggcaactactatattagactgttcttgtgttactataaagaaacacctgggctgggtgtggtggctcatgtctgtaatcccagcactttgggaggccgaggtgggtggatcacaaggtcaggagttccagactagcctggccaatatgatgaaacacatctctactaaaaatacaacaaaaaaaaattagccgggcgtggtggtgcatgcctgtaatcgcagctactcaggaggctgaggcaggagaattgcttgaacccgggaggcagaggttgctgtgagctgagatcgtgccactgcaatccagtctgggtgacagagggagactccatctcaaaaaacaaaagaaacacctgtggctgcataatttataagtaaaaatgtctaattgactcacagttctatartctgtacagraagtgtagtkctggcatctgtcctgatgagggcctcagggagcttccagccatggcaaaagttgaagggggagcaggcatcacatggcgatagtgggagcaagagagagcggggaggtgccacatgtttttaaacaaccagatctcacgtgaactcagtgagaacttatccctcactgagttcacgctagggcaatgaaaacgttgcttccccttaacatcctcctaatatctagatggctcacagagcagtaggtcacctgagaagatcaagacccctygccatcctttgagcatcctacacacagtcaatatccctctgaaatggaacrtgccatctgaccagcacagagtgcatgacatcatcaccaagtgggtcctgaaatctccagtcctatgaatgccacctaagaacatgtgacttcattgcaacaacctatgatctaaaacctgagccaagactacagtctgagagtgctgtggttaacagcatgtatgccacctacaccttctattgtgaactcagtgagggatgagttcaccaaggggatkgtgctacagcattcatgagggatccacccccatgacccagtcacctcycaccaggccccacctccaacattaggaatcacatttcaacacgagatttggaggaaatgaacgtccaaaccatatcaactaccatgagtcagtctatctcatttggtatcccccagccctggcaaggctcctggtatagaggtgtatcaggaaatgtgtgatggatgagtgacagccttgccctgtgtcatactagggrccagaactaggcttggtgagtgggtgcctctacggataaaacrtcgtcactctcggtcggtgcttcttcttctgtaccttgccctcaacaccaggtcacattttagcctctgaagacatacaacatctgttgcattaattattataggcaataaatattataggcaataaatgttattctttggcaaaataaattgccaaagaataataacttggtataattagtttgatgcatgtatatttttatcasctttatctgatttgacctcctgttgggcagaaagccaacccctttgcctgactctccataccgagagtccctgactgtgcttatcatttacttgtggggtgaggagttctgctggatataaagacataagaccagcagctctcaacctctagagcctcagaattacctggacaacttttgaaaacatgcttgtcagagcctccttcttgtaactcatggaagcccatcyacagataaacggatgagacaaactgagtctgcttgaattgaagggaaagaaagattgaaaaactccttaaatttgaaggggttctagactgttaaaagtgttggtcaggtgccggtggctcatatctgtaaacccagctactttgggaggccaaggtgggcaaatcacttgagcccaagagttcaagaccaacctggccaacatggcaaaaccccgtctatactaaaratacaaaaattagccgggcatgttggcaggcacctgtagtcctagctactcaggaggctgaggtgggaggatcaccagagcctggggaggtcgaggctgcagtgaaccgagatctcaccacagcactccagcttgggtaacagggtgagaccttgtctcaaaaaaaagggtgttaacaaagtgcttggatctttttgcaagcccttaatagtattgtattgtgtatcctacttttctmtatgggccyttaaaggacaaacctaatgbaaggccactayagacccatcagcagctccccagagtagctgaggcacctttaagtgagagtcgctgccttctgagttcctggggtggggagagccagtgaccccaatccttagytccagtrtgttgccattttttcctgcccctttctacctgatgccgagggtggggcagctcctcccttattaactcacctcttggtgccttgagcttaatttamagccaggagaggaaggaaagttggcatttaagcattgtaaccagttgaaattcaaacctcatgcatttggaggaaatgaaygtccaaaccatatcaatttaggcttctgctggtttagtccatatccctagggccacctctctgggttttaatgccatraagtctagaagagtttgaaaggtgcctgtctgatgggggtgcaggtgggtactcaggggtctgtatggtcatctctcctctgctccacgtggtcatctcctaggttgcaatcccagtagtcaccaattagtccctctgccattgcacacttgctagtcattatgtgttgtggtgctgtcctgaggaggtcatttttgagactctttctacacaggttgagacgagtcctctggaagatgactgcatcctgtgacttaagctagaaagggtgaggttgttctttgtgtcagtcagcgtacaagtttttgtgtggactaggttttcatttatcttgggtatctgcccaggagtagcaatcctgggtcacatggcaactctatgttaaaccttttgaggaattgccagagtgttttccagagctgctgcaccattttatattcccaccagcagcatatgagggttctgatttcttcatattctcaccaacacttgttattgtctgtctktattatagccatcctggtgagtgtgaactgttatctcagtgtggctttgatttgtatttccctaataagatactgagtgtcttttctgtgtttatcggccatttgtatatcttctttggagaaatgtctatttcagttctttgcccgtttttaraattgggttgtctttttattgttgagttgcaagtgattttkatatactcatgctatgagtcatgtatcacaggagtccccaacccctaggccatggaccagtagtggtccaggaaccaggccgcacagcaggaggtgagtggtgggcaagtgagcaaggcttcatctgtatttacagccgctccccactgctcaaattactgcctaagctctgcctcctgtcaaatcagcagtggcattagattctcataggagcacaaatcttactgtgaactgcacatgcgacactttccttataagactctaatgcctgatgatctgtcactgtctcccatcacccccagataggaccatctagttgcaggaaaacaagctcagggctcccactgattctacattatggtgagttgtataatgatttaattgtatattacaatgtaataataatagaaataaagtatataataaatataaagtgcttgaatcatgctgaaaccattcccccgtcaccctggtccgtggaaaaattgtcttccatcaaactgatctctggtgccaaaaagtttggagactgctgatgtatcagataggtgatttgaaaatattttttyccattctgtgggttgccctttcactttcttgatggtttgaagcataaaaactttaaattttaatgaagttcartttatttttaacttggtggcttgtgcttttggcattgtatttggcttgtgcctaatccaaaggtcacaaagatttgttgccatgttttcttctgagagttttatagttttagcccttacatttaagtctttaatgcattttgagttaatttttgtatattatgaggtagtggtccagcttcatttttttccatgtagatatccatttgtcccagcacctttgattataagactattcttttcctcattgaattgttttggcacggttgtcaaaaatcaattgactrtcaatgtgaaagtcagttttgtttcattgatcagtatgtctgtctttatgccagtatcacgctgtctgtattactttatcttctagtaagttttaaaatttagaagtgtgattattccagctttgttcatcttcttcaagatcstttgggtattctggatccctagatattrtatatgaatttaaggaacagctcatgaatttctgcagagaagccatgcaggatcttcataatgattacattgaatctgtagatgaatttgaggagtgttgccatcttaaaaagtgttttgatccattatctcaagatgtctttccatttattaagatctttaatttctttcaatwatgttttttcatttaccgagtatgaattttayacttstcttgttaaakttattcctaaatattttatgccattatagtggaatcgttttcttaatttatttttcagattgttcattgcaaatatatacaaatacaattgagttttgtatattgaaattggaccctgcaacctgaactcatttattctaatagtttttaagtgaatttcttaggattttctgtatacaagattgtgtcatctgcagatagcattcattctggatgyttttatcttycttgcctattgccctggctagaaccttcagtacaatgctgaatagaagtggcaagagcagacacccttgtcttcctgatcttaggggaaacgcattcagtctttcaccataaagtgtggtatgagctatggaatttttatcaggttgaggatgttcacttctatttgtagtttgagtgtttttatcataaccacttgctagtatttagttgaggatttttgaatctatgttcataagagatactgggctgtagtttggtttttagtgatttctttggttttggtatcagagtaacactggcctcatagaatggaattgggaagtgttccttctaatttttggaagaatttgtaaagagtagatactgtttaaatttttggtaagyggtggagtggttttaaagtgtgtatttccatttcatgcccagtaagagtaatgtagaaccatctacatatattgatcaactgctctatgcagtgacttctgcttggtacttcacatgcgtcatctcattcaatgatgagaaactctgtgaagtgggtttcctctttcttttttttttttttttttttttgagatgatttcttgatctgttgccaggctggagtgctgtggcacgatctcagctcgctgcaacctctgactccctggttcaagtgattcacctgcttcggcctcccaagtagctgggattacaggcacgcaccaccacgcccaactaatttttgtatttttagtagagacggggtgtcagcatgttggccaggatcatctcgatctcctgacctcgttatctgcccacctcagtctctcaaaatgctgggattgcaggygtgagccacggtacctggccgggtttccattttatagagggggaaacaggtttatagagcccaggatctgtgtggctgtgaaacttgttgtctttgccatataccacacttaggatgtgatcacaagagattattctgtggggaatggtgacggatcagccagccgtgggggaagggagatctcakgtctggaagcctgaattttgaggggccactggcatgtgttcctcattctctccctgcctgttttttgcaatgctcagctatgtcctcatccatgtcacaaaggcagggatgtgattttagtagggaaaattacttgacagcctcctgcagaatgaatctgtaggggatccaagcgcaaaggtgaatcaattgcaatttagcccccatgttataaaagaccctttcccatcctcctctataccaactaatgatttcaaattctcttagaacacagctgaattgttactttttaaaaacccatacaaatagttgctctaataataaatagcaaaaacattttttaaraactttcttcgcactttttttttttttgagacggagtctcactgtctcccaggctggagtacagtggcgcgatctcggctcactgcaagctcttcttcctgggttcacgccattctcctgcctcagcctcccgagtagctgggactacaggcacccaacaccaygcctggctaattttttgtatttttagtagagatgggrtttcaccgtgttagccaggatggtctcgatcwcttgacctcatgatctgcctgcctcrgcctcccaaagtgctgggattacaggtgtgagccactgcgcctggcctcttcacacttttaattcttactcctctttgagtagactacaatttttgtttaattagtattttttcttttataccttttttttctggtaatagtcaccttattttggttttgtcaacatcatcagaagtccagcactagattagacagttgagtgtcaatagcaagttatctcttttccagaatttgaactgtgctggtccaataagacaggtaaagcaagtgggttgaagaccagagatcatttgttcattgtgagmttttggccttcctaagaccagrtttgagagcccaaaatttagcaagacaggcaaacaaatacaaaaacatgaaagctgaygtggacccaatccctgttggactgaacaaaaggggatgaatgtgggaataaagacaaagacaaaagagtatatttggaagaaggggttgggggctccttgcttccagtaaacragggccctgagyttttagctcccttcgtatttattgagtaaaagagatagggagaagggtgtggttgtcagtcagcaacttgactcggtgcaggcttgcacarctgcattctctgaacagtagtctccagatgtgccagtagataaccttaaggagcatggtgccagggagtgattgcactcagcaaaccttctggtggcaggtgcagatgtgagtttgcccacatcctgcattcatgataaacagtttgctattggatcatgtagcctcagtggaatgctgacttggtcacgatccacaggccttcagctctctacagaaagcctgttatctttgcaagttcctcaacaaggcatgtgagcttgtgatagacttttcatgatgtgtttgtggacattagatgaccataaatagtgctgagctcatctgtcttgttttaatgggatttttctttcagtacacaatttttccttgaaaacaaaagaagctttaaccmaatcrattttcttaaaaagagcatttacaygtatccagttaaaattcaaatcccacaagaggagcctctcctcttcccagcatcatgagacatttttcccctattgctctcttccagcgagttgcagacctggagcaagaaaatgctctcttgaaagatgagaaagaacagctcaacaaccaaatcctgtgccagtctaaaggtaagtaccaaagcacttgagttttatttggggttttaatctcttttcctcactgacttctcccaaagactcctagcaagcatgcagttagactagaggctacagtggggaaaggattttaatagaagaagatgaagaataatgacctttaagatcccactaggacatttggcctcaagagtgtaaagaggtgagacacgtataatgggcaacattgtacatgagacttggagtcagggaggcccgcacttgaagcatgattctgccgtgtgcttctgtatggccttgaataggctttcagtttgttcrtctactacatggacataaaggtccagacatcrgggggctcatgggaggaatgaggaagaggctgcacgtgaagtgcttaggagggtgcatgacactcagcgagcgctcaggagctgtcgtcatygctgggtttcacatttgtctttcatgtccatccacgcatcatggtttcttctacccagtgggtcatctgttaatgtttactgaagaaacagtcttgaatcagatcccaggtcagcctctctcaagtgcccaccagctcctgggctgccatcagtccccatgtgccactcggctgtggaggagcagggagagtccacagaccccagtttctgcttcaactcactgtgattttsagcaaatccccttctcccatactcaggttcctcattcatgtcacaagaggatggaaccacatgacctcacagtcccacccaatatcacatcttyttgaaaatgtgaactgttttcaaatgtccttttaaaacacttttctgtccrttaatgtgaataagttttggcagggragtagcccatccttctctatttgccttctttccttttaccccagtcgcctttaatctccctgcactcctaagaactgaaagatcaggactaggaaaggagtgtggaataagccttcattcttccaggaatgctgccagcagttgctgtgacagttggcagaagagaggctggggcatcaactgagggaattctcacctacgctgccaacttctctctccccattccctgagagcagggtctttctctccctctctgaagactaagccagagtaatgagactcacctttgctctgcagtaggtgaggagcgtaatagattcatcaagagcctctgatgagctcgtcatgggcagcctcttaacaagagattaatcrgaaarcatgagtcaatacatgtgagggaatccatccagaaaaactgcagcttagcgtgttgctttccagatgaatttgcccagaastctgtgaaggaaaatctcatgaagaaagaactggaggaggagcgatcccggtaccagaaccttgtgaaggaatattcacagtkggagcagagatacgacaaccttygggatgaaatgaccatcataaaggcaaggggggygcttctgctgtgccatggcacaggtccctggctcctgtccagcttctgaccacgtgatctcaggcactgctttctgatatgtgatgctcagtccatgtgtcatatrtgcagcacttgccattactgcagagaggcaaaggtagctggactgggtgattcattcctactgacagctccttttccaactttggggtcatgaagatctcagttatgagtttaaggaacattctacccaagtgtgttatctttcctgtttcctgttacgggaacattcctgtgttgagwcagtaatggggtgtgggagttctcagcttcattagtgtgtgtgtggcagagagacccacaagggcctgattgtgtctcctaatctgatgagatgcagtatasatagagacaattttatgatattttaggatctgtcattcttttttaccccatgtaaacatttcctccagaaatgagtattcaaacaagatggagtaagktaattgcrtagaagccaggaagaaaagctgaataggaacatccagagaagtctaaaattgtcctaccaagctcarttttcacaytgacagccaaatcagatgcaggaaaaaaaaaagtatttttaaatgaacagtataaatggtaaactatttttaatatgctactattttcataaaatttgaggagtgcaggttgaagggaggggccattctgggcaggtgtggaacattcctttcaagggagaagtgggtaatgtgactgcctttgtgcatttcaagagcaagactgggagggaaaggtttttccaggacttctcggagaaattgacccaagtgttaggaatttgcgtttcattaagagatgaaaagtggatgactacagtaagaactgtaggtgaaatgtttcatagggctagctytatttagccatcattccaagaagcaatgatacctattcttgttgacaaattaggcagaaggataactctagggcctgccaccatgggaggtaaattctcatgaacattagttcctaatgagctatcacgtttttcttgttgaacagcaaactccaggtcataggcggaacccatcaaaccaaagtagcttagaatctgactccaattacccctccatctccacatctgagatcggagacactgargatgccctccagcaggtggaggtgagtgaygcaggctcttgggtactgtcctcctccagagggagtgtgtgtttttttctgtgtggaactgtccaagagaaatttactcttctgctgatggtgaccagagtgcccaggggctaattctcaagagcaggatcacttggactacagtggatttagagacagttctctggagttaacacttactgtgtaaagcaatacattattgttcaccttacaccctatccagaaaggaaagaagaaggtggatctctgattcctcttgaaaaaccaagaagctgatgcagagaggtgaaataggtggtttaggaaggaacagctaagtcattaaaatagatacaacttatccccacttaatatcatagtgcatatagtaatatcaataaayaaacaagaaaattgccccctcacttagaagctggataaaactcagaacaacaaaaaatatttggaatgaaagtatgctgggtgactgtatctttgttggtaatarcctcttagtcagtcactaaatataccacacagtggactgtgtggtctktgtataattttgtcaaaggtacaaaagatacaatttttcctctggcatttgaaaagaaaatcacaggcacatgcgcgcgtgtgtgtgcgcgcacrtacacacagaaccttgtaaagtatgtggaaataacatggaggagagacagaataaaaacaaatgggtttggagcagttctttgtgcaggatctgctggtcagtgctagagaaacagtggtgactgagccggagaagtccttgccctcatctgacagagagctagtcartgagcagttagggaagaaacatgtgatatgattgcaggtcctgctaagtgctataaagaaaaataagagaccatcagcaatagagaatgctggagcagagggtggagggagagaaggaggtccccagaactgaaggtctcctctctgttgtgcggttctgcgtggcttgctgcctgccagacgcacttagtaagccttgcataactgctggcttgagatgcttggctttkcattgyggtcttttaagtctaggcccytggaggtttcagtcagcctcaactccaggcttatcaccctggtgtttgtatgtgtgactatctacatgtagacataagcattgtcatcactggttttatgttctttaaggaagccaagactggtccagtgctggttaaacatgaagccttggtggaaccagtgcttattaaatcctggtggaaccaaattatattgtctcacatgtacatacatgtgcttaaaaatccacatggatgtgctcatacacattacccattcmcaggcagatagacgtgtttgtacacccctatccccacgcattggagtcctggagggcaaactcaggcatgaatccaaaaggaacaaaatctgggaaatagatgctttaagatctgttggataaataggttccggggcagagcaagcattgattccatttcaagatgcaatcaagtgatggctgacagcacattgcagtgattggtaaccatgttgattcytcatcaggaagtgctatgtcccaagttctatagtttctctggtgtgagaccattttccagaagtgagctcttttaacttccaaagaaagtgcctgtgtttttatccatttgttcttggaatatatggttggtcattttaagtggctcacacaggaggaatataaatggctgagactcagatgttatctggacagaaaatgagcctggagcaccaactgtgatatgagaaatgttagttggttgtcattggctttgtatttgagatgcaaattgatgtttgggaggagagaggagacagatggctgatakagagggaggcagtgaagtgctgtgtgttccctaaggcatgtatttaggaaaaccttttttctgtgcctgtcttcctttgaaggaaattggcctggagaaggcagccatggacatgacrgtcttcctgaagctgcagaagagagtacgggagctggagcaggagaggaaaaagctgcaagtgcagctggagaagagagaacagcaggacagcaagaaagtccaggtacgtgaaggggctgcagtgctcttatggtgcttggatgagagaacaatctagctcwtgtgtccagggctcatgtggcatgtgtgaccacatgggattgtgctcctgctaagtctcagagrgctcctacttagtgcattggagtcatgctgagtcttctctgagtgcccctacaccgcccagctgaacaggagtaagctccctcatgccccgggtttctgytggtgaagctagggggaastctgtggcatcatcacctacttgcaaagaggggagcwccctgccaggaggaccagggtgtgtaataagagtgtaaatacagcagaagtcaaatgtwcacagagatgacctatcgccctttcatacctgggatcttgcatgggyttgggttcagcctttttgggtcagaggcagaccragtgtgtgtcactcactttcctctctcatggctgcacccttgcctcagtccagattatcagcagcctcttgrgtctagaaaggatattgtttgaaatcttagtagccccaaaagtaatcattccatctcaaggaactactgggcacccatgctgcattcagaactatgccagtgccaggcacgtagtaggtacacaaaatgttcattaaaggacagcagataacaatataagagaaattcccagccattgaggaatttaaatgttatgaggaatttagatgttacgtctgggagaaccagacataacacaggtgaaaagtaaaaaataacattggtagcacttaaataaatgcaagttgagtgcaaacaggttggtgccataggagtagagaatccattgactatagcagtgctaaggaggaaagaaccatttatttctttggagatagaaggaccacttctaaagggtacaaggccaattctgccatgggttatatcatcagctgaactcatagtgggtttgaaaaaggcctttggtatgttctcaggcctgaattattaattgtggagtttgacacctaccccatgttctcaatccctaccccttccctcacttctgtgtccagtcattttttgcaacacctgtattccctttgcaatcaattgtgatacagattctgatctatattgctggcaaattcttgttttttttccccctgagcagtaagtggggaggtaaatcttgccgatgggtttaaatctctcaggtggacttgattcagaatggaaagtgaaaagattaggtttctaaatgactcattgaattagaaggaaagctgccctgacaggcaagtgcaaatcaaatctatgaaaagctacacagatgacatcagacggtgcctgatgtacaagttcttggcctatccagctgtacctaaagattcattctccaggctccccattgcagacatgccarctaattttrgaatcttggctttagaacttctctggataccaaataaaaaagggtatctttttcctccaaaataaccactraacaatagttagaactctaggcctgggccatagctctgtcatgtatattaaggatctctctttagggagaatggccttgtttctgacagtttaaggaaggaaaggcaggtgtgggttgggagagggtatgggatccctctacagcaccctgaaatggagcttttggaggtcaagttcttggattcrcttttggtccaaagagggatcctgaactacctgggtcttcattctggagagagatggctcaggtctcaactgcagagagaggccatgcactgagtgaggaatggcagggaagcccatgggatgtaccatcagtatggaagtgactgaggcgctrtgagggtggggcctctatgacagtctacagtcagtgcatttgacctcccacccagccacctccctttctcaagcctggcaaagtcaccttggccaatagggtgattcctatgggcttcccacttacgaacgtgactgccagcccatcttaatagagccccttgagtctgagtaggtgacctccactttctgagaatgtaatgtactcaatatcatccacggacacatggcaaatccatgctacatagaacacaagtacagaactctcaccggagcagcaggttgaatgcagaccctggacagccacagcctcctataccactggtggtggtggaggcaaaacagacactggtaccttggaggggttttaagcccagattgcagggctggaaacagtgcggtaactgtaggcatccttcagctgggaggagtacaggagatgctcagatcctgttcctgtctccaagcctggggcacgctagtgcatccacagtgggaggacttaacactgctagctagcacgtaggtaatctcattaagtgatctgtccatttttacctccaaaaatccatcttaatcagggactaacacccactacttgaaattactccaagtagttaaccatttatgaagctgtttctaccccttctcattggcmatttaagtcaaatagcagctaaataactgaggaattatttgctcrgctgaatcctagtgagttgttattccagaaattgccatagacaagcactagctttggagttctgatgtcagacagcattacagagtgttgtgggccatctctactacctgcggtagtgtcatggaggaagcagctctctgcaaggtgcttagagtttagttgggaaacaacacactggggagctttcctccctcataaattggaacgtaacttgttagccttgttactagagacgtagttttacagtgtgtgttagcttcctagggctgctgaaacaaaacaccacaaactggatgacaaaacaacaaaaattcattctctcagagttctggaggccagaagtcagaaatcaaggtgttgacagcccgtcttctcttgaaggctttaagggagaatttgcttcatgcctttctctcaacttcccatgtttttggccatcgtggtgttccctgcctggcagctgcgtgactttagcttctgcctccatcttcacatggtcatcttccctgtgtcgtcttccgactggattagtgtccacccaaatgaccccagcttaacttgattacatctgcaaagaccctatttgcaaataaggtcacattcacagtttctaggggtgaggacttcagaatatcatttgggggggcaaaattcaagccataacacagtgctatacatattcaacctataagtgcctgtggggaccatgtgagtgaaagtgggggtggggacaggagggaggtgttgatggaacacttcatggtaggctggagtgttgagctgcactttgaaggtgggaaggaagtggacttgtggagggtgggggtgttgggtattcacgcacaggcaggatgagcaagtttgaccacagttggaaacacctctgtggaatatcttgctcgaggtctgcacttatctttgtgtctctatccatgcaggcggaaccaccacagactgacatagatttggacccgaatgcagatctggcctayaatagtctgaaggtaagattcttgggggacaggcttcctggaacnctcccctggcagagggcagatgacaaatctgggcatcaggaaatcaggccctgagccccagtctgctaacaaggagagcagtaagcaggtagcttcccttttccatgctgtagtttcttaacctttggaatgaagaaaaatttgtatctactacaggaatgataataaatacataacctacccaatataatttcagttaaaatatggccactaaaaatcacttaggaaaaaaatcaaggcttgcatgggyagacatagggcagagggatctgccagtgtgtcctctgctggcatgcagggagacagggcggtagaacagtgggaggtgagtgggtcccatggcagggaggaatgcacagaaaaggggcttccgaacaggcccaccccattcccatcctcaaagacgtggtaatgtgggaatttagcctatctgccagtcacttacaggactacaaataactctggctggttggtctgaaggtagtgagttatttcaatggactgttcrcagtctgttacagatcgaactccttgttctattccttcccctgtcttactgctgcacttgacttgtcaaaaaataaataacttgtcaaaaaataaataactctggtaacagctacattgcccaggagaacagtcttgaatcrttcccatggcttatttctaattttttaaagtgtggtaaaatacacaaaaaatttaccatcataattaaccctttttaagtgtatagttcaatggtattaaatacactcataatgttatgctagcatctcaccagcacttatctccataactcttttcatcttttaaaactgaagcccgtacccattaacaacttcccagttcctcctcccccaacctctggcaaccacaattgtactttctgtctytctgcattagacaattctaggttcctcayrtaagtagaatcgtatagtatttgttttttgtaattggcttatttcacttaacatttgtgtcctgatggttgayctctattgtagtatgtgtccatcttcttttaaaactgtgtcccattgtgtgtatagggatcacactttgcttatccatttgttagacatctaggttgcttctctgttttggctattgtgaataatgctgtactgaacatggatatacaagtatctctttgagaccctgctttcagttcttttaggtatataccccaaagtggagttgctgratcatgtggccatcctattattaatttttggaggaactgctatactgttttccatagcagctgcaccattttacattcccaccagcagtgcacaaggattccagtttctccacatccttgccaacacgtagtattttcttttcttttatttatttatttatttttttgatagtagctattctgataggtgtaaggtgatatctcattgtagttttgacttgcattttcctgatagtaatactgagcatcttctcatgtgttgattggccatttctatgtagtctttgaagaatgtcttttcagtcttctgaccatttctgaattatgctgtttggggttttgtgttgagttttaggagttctctacatattctagatattaatcccttatcaratacatgattggcaaatagtttctcccattctgtgggtcatctttttattctgatagtgtcttttggtgyacaaaatgtttaaattttcatgaagtccaatttgtctatattgttgcctgtgcctttggtgtcatgtttaagaaatcatcaaatctgatgtcataaggcttttgccctatgttttcttctgagagttttacaattttaggtcttacatttaggcctttgatccactttgagttaatctttgttgaagatgtgaggtaagggcccaacttaattcttttgctgtggatgtccggtttcccagcaccatttgactttttaaacaaccagggccacacagatggcataggagggtgtgtcatagagatctccttctggagttattgattagacttactttcctcatgtgatattctaaagattcaaaaccctccaaggagcctgggagtctttcagtgggataaatgcctgcagcaaggggacttctgcatgctaaccttcacccgcctttcccaagggaggcttagtgcctggggatgaaaatgagcatgtgaactattataggtagcactttcggggcatcaatcctacccacccttttagaastaatgagaggggcccagtagctccccagcagtagatgtgggactgatggcatcagcatcactragcttgctggaaatgtagattctcaggtaccccacccccsagacctgctgaatcagaagsctgggatagggcccacccatctgtsttttaacaagccctgcaagggattctgttgcccactcaagtctgagaaccactgtactaccctacgcatgaaactgcctcccggactcctgcattaaaatcagcgcaaaaactcctcctctcatttagctgtccttgaggaagatgmcccttcttgattttacaggcctcgtctccactgccaagcatggggcctggcacagagagggcrcaataaayatttgtcttaaactgccataagtctaaatagctgctccactctgctgctgttgacttaggccaggattctgaggrtgtgagacctggttttcccagcattgtctctgatgaaatgattttacttgtgggccttgtcacagaggctggtcccggggacccctggggttaaaattacccatgtaaggaagcactcatgttgaagaggctggcttgggtgcttctcaaccaggcccagcccagacattcaggggactttattaccacttactagtattttttataataatggaaattgggcttttaggcagaacacggtcagcttatatttagtgagctcccgctgtgcacatccctcctgaatgctctgaagtgtgcaaagggatgggaagtgtactgtgccctccaaaattatagactctacctgagcaggtaagtcaaagcactaagatgatgagtcgatacacctggccactcagctgcctcttgcaacctgatccttagccagttggatttgaaaaagctgcccacaggtacatgcacaagatgaggctactctaggaagacaccttgacaagtagtgattttttgcttaaacccttttaccagaattttagaaatttctgctgatccttctggaatgcaaaaattaactgcagctctcggcagaagcacattgactacgtaccctgcacaaggcttaggtgcccccatttggggtaaggtcatgtagaagggttctcagggccagtcactcctgcagagcattgtctccggaggcctgagtagggtggatggaagatgggtctccctgcagtgactgttagccccggccagtgtgcaaaagcagaggagaatgagtggtagggatggtgagggcaggaagggtggctctaggggaagctcaccattccctggtgcctgagacaggcctggtagccaaaaggagccatgactgtgctgacctggaagctggctgggcagacagaccctscttacggccagcagcagtgttggtttttctttatcgacctgctatcagccagagctggattcaaatcaggagatggtacccactgactcagagtttgtgcaagaatgatagagaactaagagtccagcttggcacttaaacacttttcacctcaactgactatccagccattggcttatccaatgttgaacgtgcatcagaaaagactcagttgagaagatccttcgagtgtttttttttctccttaatgtgtcctttttatagacatttttcattttatttgtaaatttattaaagtaattctgttcatcttagaaaaattttaaaatacaagaaaatctagagaatttttaaaaaatccatattcctgccacttaaaggcagtctctgatrttatttggatatttatttctaatgctttttatatgcatatttatatagttgttrtatatataattttttattctgctttttttctcactataacgagcatttttctacatgtctttgtaaacatgatttccatggttgattaaaatkttatgacatgattatcacaattatccattctctaaytgatgaatataytctcatgttttacttttataaataatcctgtgatgaaactaggctttttctgagagagaactggactgtccattttattaaaattcctcataattttaaaacaagctgtatccattactgtttactgtggctagatttgtgagagccattttcacaactttagcttgttttatggaacacggatcagttttactggcttaaaatcttacagagttatagaatggtggtatagtgttgactatatatagaatttcaatgaacccttattcaaaattgtgccgcctccagtggtaacgctcatcccgtgtgaaatatctactttgtagtggtcatcctcatagagtgctttccagggatggactgacgtttaagaaatagacacccaaactctctacagaaaggtttcctgcccagtccaatgtccagctaacctagggctacccagggacaggaaatcggaagcatgcggtgtgcagggcccagcctcagcacactctcccggggyggtttcacccccacccacccacacatcctcccaagacttcagtcctcaccaacatactgatccatctctagcccataattccaactgctcactgcgccgtggggactacagctgcacacatctgaaccctgaaaccccatcttgtctcaatagatgacacacgtcacccaagcatctagactttcttccyactcacttcccacatccaagcagtctccaggtcttgacagttccacctcctaaatctctgtatctcattcacatctccctctgctccctgccatgggccatgccacgttatactccagccaggtggcccatctccccatgcaaaccagggaaacccttctgaagctctgcgatgaccagctcactgctttttcctggatccagcttccttccctggattttggaatctcttgacccccaccmsctctgctctgtcttctgcatgacagcatttccccggcaagtcctgcttgttcttctctgaggcctttgtacctggaggcctcttgtctgcctttttcacatagctagctgctcctgtcctttagctgtcagacctgttccctccccttaccctctggccctacccctctgagtcagtggatggcattcttctgtgttccccagtcactctggattcactcatgtcatagtgtgttccaggctgcagtgccatgatctgtactttagtgtaattgataggttctaagcaggtgttgtgcctgcagcacctagcacagtgcctggcctgaagaaggcagatgatgaagattggtgggaggcagggcyggggaatgggactcccttattctccaactggaatggcatagcatttgggtgcacaaaaatatgtctttcacacaaattcgtctgtttccatttatatgaggtacctagaaggttcaaactcagagacagaaagtagaatgatggttgcagcagatgaggagcggggatggggagttwgtgtttcatagggacagagtttcagctggaaaaggtgaaaaagttctcgagatggatggtggggatggttgcacaacataaatggacttaatgtcactgaactgtgcacgtaaaaataggtaagatgaggtcgggcgtggcggctcatgcctgtaatcccagcactttgggaggccgaggtgggcggatcacgaggtcaggagatcgagaccatcctgactaacatggtgaaaccccatctctactagaaaaaaaaaaaaattagccaggcgtggtggtgggcgcctgtagtcccagctactcgggaggctgaagcaggagaatggcgtgaacctgggaggcggagcttgcagtgagccgaratcacgccaatgcactccagcctgggcgacagagcgaaactacatctcaaaaaataaaaataggttagatggctaattttgtgttttatattttttaccacaataaagcatgcatattcttttggcactgttgaccagaaaggatgatgagggaatggtagtgaacctgtgggggaggagaggggagtggagaggagaggttatgtgtgggggaccaktgaggtatggttaggggagatggtgtccaggaatggttagagaatgggataaatagaaatgtcacagatgtgccctgggtagaaatccttgaaaaacagccagagctttcaaccaacctggctctgtcttgaggcacaatctcacagctgagtagggcctggcgtggctgtcagcacaggcacacagccaacagctgtcaccgagctcagttctggcctgtcacagctggaggaaaccttagccaccagctgttctcactcccttaagccacacctgaggaggctaaggttccaggactgtgcagtgtgcaccttgagccaggaggggacccagggctgcctccacacccagtgctcctctagcatgtgacactggctctcctgaggatggccttggcwgccagaagatcacccaggcactgaggggatccttaactcctgaacttagtaaatagactcaccataggcttggtgactcatcaatgatcattattaatcaccttattttggggccctcatcatgtctgcagagttactatctctatgcatggttctaaatcttctggaaatcaccacatatatggtggagtcacaggggcgccctggaccaggagtcaggagccctggccctctgtcctgggtcagtctctaaacttgctgtgagccttcccctccctgggctcagcttcctcactcagcaaatcaagagattcattctccccagcggtcccctggttccatcatgctatggctctgtaacaaacatgcaaccaatgcatactcatccacatctttgggtttcctttgggaaattttgaatctcatgtatcccagggtcctgccggcagtttgtgtgtgatcatcagacttcatctcaaacacaaagttaaatgtactatccagaaaatatgaagtatgttccaaagttgagttcctatagcacattcaattctgtatgtaggtatttttcctctgctgacagggacagttggtggctttctatatgaccaaaacaacaaaactgtgtccctggtgtatcttccaagtctaattagtccgggacaaaaatgatgcttcctgaaaaatagggagcaasgggttctctgggcaaataagtttaggaaatcctgcattcttgtatcttttcttggaaagtcacaaagcgtgtgaacatatttagattgtaggaattcttatgtttactatatgtcatttaaaattgtgagcccagcatttccacaaggaggagtttcacagccaamcatgtttagcaacacgaacactgttgaatcactttggagactgccgctctggaggcattgtgcaggtgcttcacacttgtgacttgaagtcatgagttcacatccaggccccagctttgactgcttgctgatggcagtcagaactttccatgtgtgtcaacgtttaaagagcgaagtttcccagtggacaaaagaaggggaggaggggaggcccacacarggagagagccctagggcagggagtaatggcagcggcccttgggctgtcttccagaggcaagagctggagtcagagaacaaaaagctgaagaatgacctgaatgagctgaggaaagccgtggccgaccaagccacgcagaataactccagccacggctccccagatagctacagcctcctgctgaaccagctcaagctggcccacgaggagctcgaggtgcgcaaggaggaggtgctcatcctcaggacccagatcgtgagcgccgaccagcggcgactcgccggcaggaacgcggtaacaagatggcggcccgcggtggggctgccgaggggtgaccctaggtggtagattagtgtttttttaattatctttacccacgagggtctaaaacctgaaagagcagagtctctcgctgtggggtctcctccaaaaaggcagagcaaaagccttgctgccctgtcagcatgaccttccctgggggatgcagctacaagcttctggactcttctgaagttaatatgaagatgtttaataggtaacctcagggtggccttttcaccttataccccttgctgtttgctttctgaagtggagagagtcattggtcctcctcagtcccccagggtggcaagtcctattcactgtattttcctaatgttctcactttctggggcagactagagccagagggtggggacagaggccacgtgggtcactccatgggctctaaaaacctgagccacttctgggcatgagcctcgggacagctggggtaagsaggtgctgaggagtgtggaggattccagctgaaccagggtctacctgtgtgctctggacttgggtgctctctcctcccaggggcacctcctggccatcttcccccaccgccccacatgcagctctgtctcagcctggcctcgttgttctgtgtctcttccaagatgaccttttggagtcatgttcctggcgtgggtttgattgtggttatctctgttctttccaggcctttgtcttttcccaaaggcatgtttttatacctgtttgtatataaagccattttgtggcaattgtttaaccagagttatttttttatctggggctttctaggagccgaacattaatgccagatcaagttggcctaacagtgaaaagcatgttgaccaggaggatgccattgaggcctatcacggggtctgccagacaaacaggtaaggccgccgcggtcaaatgtgctggacgaggccgcggagaagggccctgcccaaacgagtctgtttggggttttcctcaggtgatgaccatgtgctcagcatcagagaattatttattagaggacacagaaagactgactcagaacccctgccctactgttagctcagcaaggctcgagcaacacgctctcagcatctagagcccaggtcccctgaaaaggattaggaaaaaggagcttccctgggaggatgacaggagtggaataggaaggtctggctgagaacagcttttcttcttgagaggatgctggctggggaggggggtggggggtggctaactggcagcagagggctgcttagccatctgctgcaatgcccttctcatgcatgcagtgtgtgtcacacagtgggggcccaccctctgtcattcagaacagatggaacccaagctgggcacttgggggtggaatggaagcatttcacctccaccgtcttagccaaaatgagatctccctggatgtgagtttagcaaccactgtcccctcgaaaataagctgagccagggttaaggcaagcaagagtgattgtctgagggcagcagcagggccaagcgttgtcagcagacagaacgcagacccccaaggcagagtgtctgagaaggtgcactgcagagtccactcctcacggtttagtagcggtcacatgaccgataggtgcctcagttgcctcatctgtgaactggggacagccatagcggcatccttcctgtggctttgggaagatggggtgagctcctatcacctgtgtaagggacttaggacagtgcctgcctgtggtgcgcacatgatgagtgttactgccgtgatactgttgttatcatctgcttcctcatgcccctgtgggcacctataaaaacggagctgtctggccgagcatagtggctcacacctgtaatctaagcactttgggaggctgagatgggcagatcacctgaggtcaggagtttgagaccagsctggccaatgtggtgaaaccctgtctctactaaaaatacaaaaattagccgggcgtagtggcgggtgcctgtaatcccagctactcaggaggctgaggcaggagaattgcttgaacccaggaggcggaggttgcaatgagccgagatcatgccattgcactccaccctgggcaatgagagcaaaactgtgtctccaaaaaaaaaaaaaaaaaacatggagctggcctcttccctggctacctttctctcttacctcaactaatagaatgttgatcaagtatttgttcaaaattggtgaaaatagcaaacatttcccaaaaatgtcattaggtggcactgtgagtgccactttaagtttttttgcaagaatgtcacagagtcactgaagacttctggtactttgattcccagatcttttcatccagtccctctttctgcagagaaggagactgaggcccgggggggtggaacagcttaggcccacgggtggcctgtgcctgagtcaaggtagaatccggaaggcctgactcaggctggggcagtttccagccactgagtaggtaatcagaagttgaaggtggtgtcacaggctccaggaggaaattaaatttatttcaagagaggtataattcttttccctaaaggagggagaaaaggaatgaaggtgactctctcagtgctaaaactggagtcaagatttagtcattttaaattatcttgggttgaagataagaaatgagatgaataagaaaaagcccaggtgatactaaagtagaagggaagaagcarctgtgtgcttggtctgacaagcggtgtgcgtatctccccgatcttcagagccgtcaccattggcagcctcttttattcatgcagcggttgtcagggatccagaccccagtttaggttttcccaggggctgcttaataccctggatttgtcttcctttacagcaataataatgatggtgataaaataaaaatagcttttattatatcttaaaataattctgttcccagcaagcctggtgtacaataggaaattaatagcctgtgaaactgagttaagtacagaaaaggagctggctgccctggggagtggaggcctgaagagccagcttcgcagtgtgtgctgcaccaggtgctgtggaagtggccatggtgggcctgcctctctcccagtctggcctttagctttgggaagtgttcatgattgctgcaaatcccagcattgagggaggagaggcagggaacagggacccaactgggattctgtggagcccatgacaaggggattcccattaccatgagggccaccctggcaactggggtgctttggagatagacagctgctctgcgtttcctacagttttcctgtaatggagagttctactgtttaaatataaattatatctacacatgtgtgatttgtgaaagaccatttagaattttgatgacatctatcctctccctagaggaagttacactcatatgctgaattttgcttagatttctgggggcttccatcacattcccagtcatagcctctttaagcattcatgatcctcaagttcagaacttttatcacttgctaaccttcataagtttgtagagttttgttttggtccctataactgtgtcttttcccttgttttgaactctggggagagaagctattattgaggagctgctctgagaggagctgcaggaatgcgggtggcacttctgcttccacaaagctttctccttttttacctctgggaactaagagacaccagcatcattatcaccattttatatataggaaaatgaagggggaagagggctgtgaacatgagctgggtgctgggcagtttgtcttcttttcagggctgtatatgggagaaggatggggaagtggtttaggagggcacaagttgccactgccctcagcccaacctcacctcggggtgagcacttaaagtcagagttaggtaggggcaggagtgtggccagggctctggtctggctctttgacagtgctcctttgattcctgtcmacttctacccaagccttatcaagagtgtaaaactccaaagtgagactggtgcattcccgaggtcccagaaaacctcctagcagctcctctccatccagcaggtccccggcaagacaggaggcctccaggcattggcacctgggcttggtcgggcgcacctggggttattattcacacccgccgccccccgccaatacacacaccaggggcctgtccgggacagcggagactgtgtttgacaaggaactgtgtgcagtctcaagatttgctcggagctgttggctcatttgaccttgagcctcggctgctgtgggctgccttgctcagaatggcaaagaaggcgggaagagctagcttctgcccagcccctccccagagggcccagctttaaccagtcctgactaagagctcttggcttttttcaaggaggtgatcatttccttatgttccccaaagttctgctggtcctgagttggcagcacagtttgggtctgctgtaatttcatggctaggtcatattaatccacaaactgttcaccctcatatggccaggcctagggcctcagatgtttctctgttgttcctggtgtttggagtgtgccttccatttcccagaggtcccagggaatatgctaggaggttgaatagaaagcttgggtatgaactaaagaagttaggctgtctgtggagcacacagtgggctttttagaaccggraaactgaccatctctgagctggcaggaaycttgtctgtttccccaggaaggcaggttcttaactgtggcggggccrtggttgatagatcctgtttttccaatatcttcacagaggccaagtaaatattatcctaggccttgtctggctttttataagatctggaagaaacctttgcaataaggttagtaattaaagatctggaagaaacctttgcgataattcagtaggctactttcactttacccgtaaagaaagagaggcccagggcrtggaggtgattagcccgggccacgggctcattacaggtggggctgggagttgccccaatgctaggttctccagccagtttcctggatgccgagcctcactgccccctgtggctggagactgactgcagtgagttaacttatctctgtgtgtcacagtggtctctctggaaatatttgtagatttattaattgatatcaagcacttacattttcaacaaaaaatcctgagccaagtagtttgggctttttcttttcccaccaggaggtggcgctccctccctggccttggcccataatggcctaagtggagctggaggagctcctccaggggttctttcctctgggaaccaacggctgaagcaagttggttgactggtttttagtttactcgtgtgtctgatttcctgagcactgtgggctgcctgggctgcacagttctctacttttatctttgtcaatagtgcctggcttgttacagaattaagaattctgggagtatggccctgtgaggctggtggcctgggcattcattaatcctaacttycttgtgtgagtcagcttcgcgtgccccaccctagagagctctgcagtctgtagstttacggggacgacagaggtgaggtgaacctctgagacagagccccagcagcccctccctggggggtggggggctggaggctggaaaggagctttagttcaaggtctggagaccctgggtcctggcgcaggagtcagtrtctctctggtgtgggaaaggaggtgggtggagcccaggatccctgcacttgttccctttcagcgctgatgcgctctacttccggccctccccaaraatcactgcagtgggtgcctacagtcctccagtgagctgtgcctttgggttaaagcaccagccatgaaaggccgtagtaaaatgcaggcactaacatctgagacgggatgatgctgagttatgagtttgggatttgttaaagtctatgttgrtgttaatgatggagaggtataatgaggcacatcsgacccccacttcctatcgtggcctgaaacagtctctcaggttaaacattaaaagagccctggctgaggaggaagtcccttcagatggtggggggccttaggattttatttttggtttacagatggtttgcaccctgggaatgaggacgagggsattacaggtcctcatttagggctgtttggatgcagttcttgctccattattcctgcctggaaagctggaatctggcctgcaggaggagtactccaggaacagaggctgttaggagcagggaggtgcggcagagtcctgctgggggcagcaggcccctacctgccctcctccacccaactctgctggcccttgagtatctctgtgtgcccagggctgcgcaggttgaggacctaggtggaggtggaacattggacacacctgacctccaggagctgcccttgctggcatggggcagacactgggtgacttggacacagcaaaagagtttgcatgtagaggggtaaagagttctgctttcccaaattgagtaaaaagtggtaacgcaccccagtcccaaggtcaaggggagacatcattcagttctcatctagggcatcacaaaacttgttttagctattggagaaagaccctgcaaggagagctgaagttaagattagttaatatttttgtgcctttaaggagtcccagaaagatctgcattgaaaagcaggtagtgtctgcagtctccttccttaccctgggtgggcctgacgtcccccaggggcttcccatgctgctctgcagatgcaatgtgttccccaccatgagcctgctcactgcctcccgcttcctccatgcacacttagggttctctcctcccagccccttttgcatctctccctgtgcttgtctgaatcaatctgattgagggaagcaccatgtgtgaggctatgtgaatgcttccacactacccacactgctgccttgctgccatttacagagttaccagaacaagctggccctctgctgtctctggggcagcatgctttcccacctggggttattagcaggccccacatgagaccacatgaacccacttccaggacagtacctgaaactggaggacttatgggagagatgctgtttgcaggtgacaggagaggaggaagggaaaatgggagttcttgagccttgcctttttttcrtttccaaaccttggctagaatctcctcactttccaggactccctgcctgcctgtctcttccgtctacactggacaccctgtttttctgtcctttgtttctagcaagactgaggattgggratatttaaatgaagatggagaactcggcttggcctaccaaggcctaaagcaagttgccaggtggaacatattcctttcttcctgtgtctgctttgtccgttgggcctgctcatgtctatgcttaaccgtttttcagctacmgtgggtgcgagagcacggggaacagttggcatgcagtctggctggtagcccctgtggttgaccatctgtcactgtgcccaggctgtacagatatggctgagggtggctggttgtttgggtcaaggtgatagcatttagtggacctcctgaggtccagcctacttgttctataggtgaagaaagagacaagagcagsaggtcacatagcggcaggcacacagctctttagaacaaggctgagaaggaaacatacctctggggaatcctgggcctgtgctgctttcacactacatattggccctcctaactgcaggatcagccaaaaatgtctgcctgatctgtgctgctggctgtgctccaaatgtaacctgtgcccccagagcctgccatcagtaygtgtgctggtcctgatctccgggactccctggagctgatggcagccaagtgcagtgcatgcgccttgacatctggcctcacagcaccttcatggggtggggacactgaagcccggagggtttaaggaaattgctggtgaaacagaagatccagaatttgaacctggttccagctgataccagagtctgtgcctgaaacccactggccctcagcagtgggtgagcagcttagccagacagggtaggcatgcagcaaaaggacaccatgtgatggtcacaccataggccagttgacyrcaggtggcttttaagagctgtggcatagctttgcctattggagcctgactcaacaagagatggactggtagtcatcgagcttgctttccagagaggaaaccgggactcaacaaggtggcatgagtgctggacccagctccctcagccaggtggtggcggrgcaggagccagaagccctcatgctgcttctccttgccgcctgctgaggatgtagtagaggtactgttgcaccaagagcatctcttcttggaaaaagaaagtttactcagctgattgacagggtagtgtttctctgggttcagatgtggccccacaatctgtgagcaaggtgacatggtgggtctgtttccttgtgaatggaataggaccttcctcacggggcattataaggaataaggttaatacaggtgaagtactttgcacatgcctgatacgtaaccatggaataataaatattagctgctacttctattactatcatggttattattcaataagatcagatttctgtcccaccaagtagtttgttttattggaggaaggatccttgtgtgaagccaggtgaktcctcgtgcctctccatcagcagatcagacatggtttcatgaatcggcaactgaatgcattaataaagcacagasctatgaatcaagagtcctggtttctagaatcagccctgccactggtcgtggcctcaragctcttttggccttagttttctcacctgcacgatgaggtggctagcctaatgtttaagtaggaacagaccctggctgagtcagctacagtccacctggagaataagacatgaacagtgaacgtgctgcacaaggcaggagagaaatcctcagggcagctcgcctagaacccaagagtgtctgttctctctcattaaatgtataacttattggtgactacttttaatgtgcttactgtagccaatattggatattatctaaatgctgtatttcatttaaaatcctgatttaattacccaattatcctccacaaatctcatgttatttttctttagtaataggtaatatcgcctgtagtgaatgagtgattttctcaatcacttcttcattcatgtaactttgttgaggagccactgggagtcaggtgttacacccagtgctgctatggagctgactcagctacataaaatgtggttgcttatatcaacagtgtagactttccctctctctcttgctcccttgtagacatggtcccacctgtcttatgataattctcacctcccaaaccatcagaactgtaaaaaacatggcgccttcctccagggcagccacggcctccaacagctgtgttagaggcacaaccagttcctacctgtgtgcctaccttggtcataattgttatgtgcattcctggaagacactggggtggattttttccatgtaaccatgtctggaagctctttacagtacagtacctctcccccagcaccctagctttcttccatatgaagcctgctgcactgaatcggaaagctggtttaagtaactaagtccaagaaggacaacatcatggtcatattagcatctaacttcctgaagatgcggctgcctgtgagccttcattaatctcttgccttctattatgatgggagcattgcccaggtaactggcacctcttggtcttgggccttttgactcagaatgttataagacttctcctcaatctttgcaagatctctaggtctctctgcttcttgtcatgacaccagctgatcttacaccttccccaagatcatttgcaaatagtcttagttttcatttttggctggaggaaacttgtatgtaaaaattgtatatgcaataattgtatgtataaaataaaatggggctagtaataatggtaaagataaaaaaggggctaatattttgcctttctaaaacttgtggagaatctgccacagggaaaatatgtgaataatataattagctcagttttgccagagttttatcttaagaaggaggttcttgtgaactttggggcagatgtagatgtttttatttaaaagatgctttaagagatgtatttctgttgatggacattttgacagggagacagtctttcaatcccaaaccattaaactatgctcactgaatgaggaacaagggtcgagagaaaggcttaggaccagaagtgcctttggccttggtttcccatcatctgagaggaggacactttggcctgcttgccttgtggtccccatggcatctgtctcctgctgcattcatccctctgggggatgtgcaaccgctgctgctgtgtgcttggctgctcccctgttatgtttctgcctgtgtcccctcagatgggggccctggcctgggccacgtgctcacctgtcctctccctggcacaggctgctggaggctcagctgcaggcccagagcctggagcatgaggaggaggtggagcatctcaargctcagctcgaggccctgaaggaggagatggacaaacagcagcagaccttctgccagacgctactgctctccccagaggcccaggtggaattcggcgttcagcaggaaatatcccggctgaccaacgagaatctggtgggtagccatgtctagtggaccccagctttgggaagtcacgttctagaagcaaatgggatcggggttgcctttggcaaaactgacaaggttcatgacccttggccctatagtrggaacagagattctagaagtctccggtcaagaccccttcactggagctgaaagatctcagacagccccactcctgtgtctggggccttgtcgttggctggggggcgtcacctgccttcttgctgaatttcactggtctgagctgctttacctggctgctggcttccaagaggatgaaagcaggaacagcgagactcctcaagactcagtccctgaactaactgttgcttctgcccattgatcaaaaccagtctcatggctaggccagatatggygagagagagattctacctcttgaggggaggagtagtggaagaagttgttggggcctctttgcagacagtcaccaaaggagccccagcaggtgccagagaaatggaagagggcccctgtcttatgagagcttgcagattggtcagtaggggaagcaaggtatgtaataaagaagagaaagtagatagtgtttttaaaagcatgattctgcattgagttaacaatgagtattacaggaagagaataaatggtggggcgagcttttgggaggacatgaggcttgagctgagacaggaggtatgaaggggatgtaaatcatggagactggcagagggggagggagaagaaaagcatggaccaaggcacccagacaggagtgaaggcagtcggagggcggggctcagcagtgccgatcaccttctggagctgaacgtgcctgtagagtgcagcacgttcatgtgcccgtagtgcatccagtccaggagtccggccatggctgtcatttcactttataaccagatcatctgtggttgggtggccagttcacttgatcccaagaggaaaagtggggtcccagactcacagctgaatagcacttacatacacatgatcttccctccctccctctctctccctctctttgtctgcaagtcactttctgttgcatatacgtgtgttacctggtggctttatgaaaagaaatgcaccatgttaaagaaacctacctggccagcttctgccaggtagaggaggcagcctaggaaatgcatttggtggcctatgttccctggagggccattgaccaagtagtgcagtgaacaatcaccctataaagagggctgtgcaccatgcaggtactgcgttagctcacggcacaccaacacaaggttgccaaggccacacttaggagagttagtgactggaaagaggtgggtagtcagtcctaccttaggagtcctaccttaagagagcaaaagaaaacagtgcagtgggcccctctgctggggtggtgacactgggtcatgagtaggggcctgtgctgctggccgggcaaggaggaggaggaggaggagggctccagtttgcagcctgctgagrgactccttccagaacgtggtcctcctcatttgcccagacagaggctaggacccctaaggagagccagctgcagcaggttccaggggctgttggtgatgtatattcacctacttagcaagcattcctgcctaccgtgtgccagctggtgaagcactgacctcaggcagagaggagacagtgtatacacaagtaaccacagcacaaggtgcttggcagtctcacagggagtgtaagggaagtcaggggaaatggcttgaggctggagtggtggggaaggggtctgtgtagaggggaggatgtgattgtccctcctggtagcaacttgaaaagtttagcgccatcttcagatgtgctcatttttcatttccaagattccttatgaattgaattcattattctgtaagcttttgtaattttaggctttaggactttgggccttcgtgtctccacaagtttacaaccactgtggccagcactatgttccctttatttgttctaaatttgttgatttcaagctttaaagattcccaggtggttccaatacccctacaaagtttgggaagcatagctctatataattcyccttagcacattaaraattcagccttctgggatttgtagggggttgggggttagacacccaggcatgtcttagcacaaagccaccgttagtgacatggatcttacaatcacctctgcttgagcatttcgggaggggtattggattttctgggctttcctgagaagatgactgagatgtcagagctctcaaagacaggmgtcaaagcctggcctggattaatctttccttcttgaagcatctggtgtataagatgctgcaaataggcattagagcatttattgcctgtcctcccagggtgtagtgaaggttttcaaagtaatggtggaaaagacayaagaaatgctttatcttgtggatttgataatattgtacagaggagcttcggactgatggtggtcatagtaccagygtcctggtcccgatccagtctggagcagccctgggctccccattcactgggctggccaagtcttgtggccccaagagttggttaatcctttgcaagagtcagagttgtagccgaggattcagtggggttggatctggacagggttatatgaacacgaggcaggggtggcagtgcagcggagctggggagccagggaatcacatgctttggtgctgcttggcaaggcacctaacaggggagacggagtctgagtagaactcagggttcacaggagaccttcggtagccacagagattcctggctcaattttctctagacacctgggtcctttctaccaactggcctctcacrcagaggccactcttaggtcactgaataaggttttackgtctgccgcctctcctgtcatttaagctgggtttttagatgcctctcaatttaagaagtatttttaaagatttgcttctttatcaagatgaataaagtycctaacaacatctataactaggtgtgtagcttgggatggccacatccctgggactgggccaactcctgtcaacaggctgatcttaaaaagttgtcacccaatgtgtttgtagaggctccaccatggaatactcgcttctgtcttccygtcactctctagtcaccgaagccggctctagtggtggatggagcagggctcctcttctcctctttgtgtccctggccacagaggaccactgctcagctgggatggaggtgacattaatgacagcaaactcctccctcagcggcttgctgttctaggtctcagtgggctgatgggcttccagtggcaacagctgctagggtctggggccacaccagtgtcctgttttgcckctgggccctggataatctcacttgcccacttgctcttccaacctccctgccccctgcattctcacacctgtccgttcsttcccagggcgctgcccgccccaccctgggactcctaggctgagtgtgtctcctggggggttggcatggcaaccggaggaggcttggcttggggaggcttgggattcagcaaggcgccagagagcctgacctgggaggagtcttgccttgmgagaatggactctgactcatcatctcccacttcctgagttccagagcaggtggcaacagcctgtgaagagcagctctcctggcagygtccctgactggcgcatttctgacggctgcccangggccgcactggtcacctccaactscaagcaggattttacccccaccatcccaggccgggctgatgtctgttctcacactgcttcctctgcttccaggaccttaaagaactggtagaaaagctggaaaagaatgagaggaagctcaaaaagcaactgaagatttacatgaagaaagcccaggacctagaaggtagsggggtgtgagtgagtgtgttttgtgaatcacaggtatacttggccacgcctgtgggtgtgagctgtctgcctgccctctgcacattcttcctacatcactgatttcttggtggctctgcccagtccagccaggcgatagaagttggatcccatgagcttacccatctgcagttgccagaatatggacaaaagacacttgaattcagccagtttgggtgcttactctgagcaaggctctgcagggctagaggaatggggaacccagaggtgacctggtggtccctgccctcaaacggcttgaagttgggaggcaagattgatgtgaaagaatgctgtgtaacacaaagacctaaaccccaaggtcctcactccatgctatkgagtgtcaggattaaacttccaatctgggatcttcaggtagagatttaaatcactcttccagaaagacctagaatgttctctccctctgactccctgctgcaaatctcactgtgtcactctttacatatgtcaccctgcttggaaccctctttcagcccctcactgcttggatacccctccacatccttccaccctcagctcaggagccacatgctcagggcttgagtctcgtcttagacagtcctgaccccacttgtgtgttgggcacaaccctgatcacagttgtcattttacctgtttaatctcctgctcctctagactggaaggtcttagagggcagggatgtctgtgatctctatccagggggacacttctcttcatatctgcccatgtgcccaccaactttggatttgctattcctccagtttctcattctcctagtctcttggcttcaagctttgcttactcctaaagacctatcactccctcttttctgatgtttctctgtgtctgcccctacccttgtgtccagttcttgtcccctgttcccagattgcttagtagcttcccagtcctgttttttcacagcactgtctggcctttgcctttgccttattgcctgcagaatgaaatcccagccctagtctgccagccttcatcctctcacactctcccccacctccactcagagcctcccttcagccactaggagttcatggagcacccttccctgggtgtcactcgtcctggtcctcttccattggtcctttcccagtggatcagctcctttgaacctggatgtaagagtcccacccgcccttcatcccacctcttcygtggggtccttccagccccaccaccatcagcacccacatcaycagcacccacccttcatcccacctcctccgtggggtccttccagcccatcaccaccagcacccacatcacacactcctggcttggtgcctgactgagctgtgtcatagtgtttccatgtgratgtacagatgtgtctccttagttcgactggccagggacagattaagcatgccattgtatctgttcccrtgcttaggacagcgtcccgtgtgcagtcagcactgagatgtgtttgggagtgaygctgtggttgyccactgtccctctaccatggtgtgaggctgaggagaggcctgagtgagggttgaccaggcctttataccttcaaccctgccactgaaactcttcccaaatagtcatcatcttatgtagttgcaaagactgcacttggcagcttcctaaacctgaacctgcatttagtggctgaggacgtgtccttactatcaccatcaccaccctgatccaccacccacaggtcacagacagtgtccaggccttgccctgaacacctgggtttgccctgcggctgtgtcacgatggccacgttgtggccacacacagggaactgagtgtagtgggccaggccgaggccaagcacttcccagaaaaacggtatctcctttccttagaagtcagtagggaaagagaagcagctatgcaggagcggtgagagaccatgctggctgtcatccttcacaagttttctctggtctgaaacctgcctgctgtcttttcggatgtttcctctcccctatccagagtgtggaccccagtgctggatgctgagctcctcacacttggggtgtggctctggctgtaggaacagactccgcaaagagagtggaagtttggagaacccagtatgccccctgccccaggtgccatcctccacctgccagagatgccccttcccctgccccaggtcccatcctccacccgccagagatgcccgctaccctcaggcctgcagctggaagtctcatccatgcttcctgttttctttcctgctcagctgcccaggcattggcccagagtgagaggaagcgccatgagctcaacaggcaggtcacggtccagcggaaagagaaggatttccagggcatgctggagtaccacaaagaggacgaggccctcctcatccggaacctggtgacaggtaaggaccctctgwgccaccctatgctgcctgcccctccttcagccccygctcccatctccatccccagcacaacccccacaccccttccttcacctcctgcacagcccccaccctctgtctcctacttgcccttgcacctgcccccatcttccactccccacacctactctcatcctccccccagctcctgctgtgtccagctgctattctcgatggcaagacccactgcttctttgttctgcccatackatggaagtgggaggggagccacccacatgcttttcctcagcagcagccacagccccctttccttggtgcagctctctrcrggccacagtgctttggcaatgatggaagctcatgcttttggagcacatcctctaccagactcatccctcctttaatcctcacaacctccctttaagtcagaactgctgcyttctcattttacactgaaggaaacagagactcactctagtaacttgcccaggtcacacagctgggaagcagtggatcaaggattcagactccttctgtttggttaggactttacagtttaaagtgctgtgtggtacagcacatgtgggtgtggtctctggaatcacatgggctgtgttcagacctggcttctttcctaactagccgcacatggccgtggctgtgctactcaccagtgttcttgtgtagagcacaggaaaggggatcatgccgctggcatggagttgtgagaatgaaagttcgtatttcgttgctcatacatggtccctggaccagcagcatcagcatcagcrtcagtatcacccctgggaaggggtgagagatgcagagtctcgggctccgtgccaggcctcctcaattgcaaggcacataacaagatgccaggtgacattcacaggctcattaaagtgaggaatgctgagcttctgcagtctgtctgggatcaccctggtcccactgtcaaagttcatcagggttggcttttactgtccctgcgatcatctgcagtttcttatccaggcatgtggctgaatcagggctggcctgccagcctcccacccccatgtgctccctggggccaccaggcagctgtgagaaccactgctcagaattccttccccagctgggctcctaggactgaaagaccttccacactagctgccaagagggcagggttttctctgtgaaaagaggagcccccgccacccctccgagtccctcttggctgctcagcaagggccaggagggagtctgtgtgacctgtgcagcttgctcaggtttgtgcccagtgctgctttgccagtcgtaccagctccctcccctccagtcttgtgccccatctgccacaggccactgcaacaggccacctccctgctctgtaccaacccagtccagcatcsccctgcagagcmaggaagagtcttagaggagagagtcctgtgggaaagaggagaaatctttggtggtctgatcctctggaccctgagccagcagctcccttctttatggcaccttagtgaaatgggatgatgacactgacctgcctgscccatgatgtgaagtgtgwcaaaggcgaaatgctgtgttaaaactgcaaaacccttctcaaatgtgaggctttcraaggagtggtagcttttgcaggaatatttgaagttcaaataagaggcaaggcaagcattattttagagaaacttatgtaagactgaagtccgactctgctgagcactgtgcctagggccgagggacccaggaagaacagattgtgacatctgccttaaacagatttgctccagctgtttggtttgtgtgkttttagtagcctgcttcttagatgtattttgctcttttaaaaagcttaatctcccctacagttgtccagcaattaattaaatgtggtgtaagtttatcttaaacttccttaaacagactgcatcttgttcaaatgcawttaggaacaaacctttcatctctggtgaatgaaactttcaataaataaggctgcttgtgtcagacaggtggctccctcctgccatttgccagggtttttacagagaaaaccctgccatcagcatgagatgacccttgctcaggtggccccaggaaaggtcatctcctgctgagctacctaggaaaatcctgcagtcatcttccctccaaaagaccccatccaaacaaatgccaaaacttgactgccgaccacctacctcttaggtacctggcactggccagttgctgtggaggagaaataaaactagtgtcatcgtctcttccccaagatgctaacatttagctggggcacccaaacaagctttatttaatcacaatagaacattccaagacaggacaagttgtttgcaatctgcacatggatcaggtttgaagtaagaagttatggattggaagtctgggcctacaaaatacattttcctggataaatgactggcattctaactagagccaatggccaatccacagccatctgctggacctataaaatgsccaaatgtcaaccatgtactcaagagtattatggcctacagttatcatttaactagaaggatgcgttggagcagggacartgtaacccaagtaccaactggagctgctggcagcagagcccagcccaggaccagcctggtagaaggtttgcaaggatactgcccacctgcaggtgggagggaggtggcctcccttcattgccattctgagcctacaggtggctcatgaggcctcgttygggagggtatgagtgtaaagaacaagggctggagatacagtgcagagctatggtgagacccctggggccttgtgctcctgccccattctcacctgtcatcttgcctttgcaccaggcctttccccctagttctctggccttctaycaccacctgttgccttaagtctggctcagctggcatggtctggaatagaaaatggtctgacagctgcttcctgtccctccagggccttttgcaagaaagggccaaagggctgagtctgcagttaatggggagactcacaaggcccttccagtccagccagagcagcccttgcccaggcagggacaggagtgtgggatacagaggagagcagttgggggaagtaagagagcygctggagagatgcatgccaagcagcagcaccggggtggggaaggggggcctgcctgatctatttggctgtgaagctgggcaagcacggctgggtaatttgttcctgaactgwtgggccagagattgttccaacctccctagccctcagcaggctggccctgtctttgggcacatacaatttgtctaattctggagccagcccttgccttctggaagtggtggtgcccacgaatcaggagttcctgcccccatgtgggagctaggccctgtcctcagccttccacttgccatgggcccctgttggctgcggactgaggcatctgtgtaacttgcaggcacttttcctccatattgttaggctgaggcattagaagcctgtttcagggttatagtgcagacaattaggaatgtggttttgtttgtttgtgtttttaaccacagtgtctgaaactactggtaggcatgctcgggagtttgggtaccctgggtggcttctctcccaatcctctttgagacatctattcctagatgagctatggggaaatattgaaaacacgtctattcagatgaggattctgacagcctccattgtcccccatagatctaacttgccatttgctgctctcgttgcccttagacttraagccccagatgctgtcgggcacagtgccctgtctccccgcctacatcctctacatgtgcatccggcacgcggactacaccaacgacgatctcaaggtgcactccctgctgacctccaccatcaacggcattaagaaagtcctgaaagtaagcagcccctgcagaaggtcatggtttgtggtgggtagagtgaagccagccccttactgttgcttctctgtgtctgggtttggctgtagtgaatgctcctagggctccaactttgaaggtaaatgagccacagaagcatccatataaccaggatgcctggcagttcccagagaaggatgctcaggcccagcaatggcagaaagccgaggactctggtgtaggtagccctccagctcctccctgctgagcctccagacatgcccagtgcttacagaagccttggcctgcccactgccagaggtgctagggagacatcctgctgcagccaagggtgtgtgggcctcaccctggagcaagttcagggacacccctgaaacatgggccctctccacctttccaaggggccgggtgcttgcttccctggggggtaacacagggagggctgtgacattccatcacctcccaaggtgaggcaacctgggccaggacagggcttgccgcatggtgttaaaggtgctcgggaatgccacctgaaggcacaaggctcttcttgaatgtagtgcagccactgcagaaacaggctggcctgcagggagggtgaggcctgtccacacatggatgagggccaggcagtgggggaggtgagattcttgagggagatgaaccctcagtgagagggatttctacctgctagcaggcctgtgccccgagtattattgctcttagagaccatctttagttcttacacattactgcttccaggatacaagccattctcaaaagctctgagtccaaaccaattctggagtccactgagctgctggttgctgctcagaattccagagccagcctttaagtctggtttcctgccctcagtagctgcattgccctccacaggcaattttatccactcacggctctaaaacatatctgcatgctcgtggctctcagatttgtgtctccagccttgatcctctttcgtgagcaccatccagctggaatcttcggccagtctaggccaatttagggctgacacaaatgtcacttccttaggaaagccttccctaattctgagctaaaatagcatgtcccagccccagcagtcactttctattcaacctcatttctttttttttttttttcttttggtcgtacctcataccactctgtcattwaaataatgataacgcttacttgacagaatgagctgcgtgaagtcatcagctttaatgcagcagctgtctcatagctgtttgggttgctgagcaggctttttcacctagttagggtttgtagccattttctagagagttaaagccatgatgcatctgacatctagataaatgggacaccaaactattttgctgttatgctcttyagcatcccttgtgttggataactggcagttcagaaacagagccagctagcccaggcggttagacgagagcccggggctgttggggcagagcctcatctgtcactcagctttgcattcattcttcagccatggaaggcagcctgtcctttatgtgtgtccctgtatgtgcaccactgatcaggagaccaaggtgggggttctgtgcaccatccctggtggtagaggaacactcacacagcctctcagcaatgggtctcaaccccgtgactggcaagtgccctgcccagcctcagggctgctcaggaacactaggtaagggtaggaaatgtggggaaagaggtaccgaggaagcatttcaccagatgggagccacttagagctgaggatgtccttttcttttcacagaagcacaatgatgactttgagatgacgtcattctggttatccaacacctgccgccttcttcactgtctgaagcagtacagcggggatgaggtgagtggggagccaggcacccaggaggcattcctgcttcatccaaatgtggttgagaagtgctttgtataccctcagaggtcagtggggtctttggagcacccttggggacctcagaccgtgggcacaccttatcatgcctcgtggctggaagcagcaataaggccagccacaggagacctgcctctaggaggccttsatgagcccaaggggccccaaaaagcactcctgggttatgtaagtagagtctgcataacccatgatcaatagaggccctgggagtctccatgaaactcttgtaacctgacatttctgtatcagctctagaagccccactgcagtggatactggcagggagctcagttgcctagtgggtcaccctgtctcctaagccaactgattaatctgtccatttcaagatagacaaagatggccacaagaacagaggcacaccataatcagaactacgtgtgtgcaaactgacctggaggcccagctccatgcatttatccaaattggattccttgacctgaggcccaactactaaccccatcacttcacaatccacaccggacctgtaaggcccagctttttctggaactcacattcctagctttggtccctgaaagaacttctcccatgctctgcactctgcccaatgacctagtaatatgtggcttgtttccattctagtttctctggtgagaatcccagcttgttccagatatgcccgctcacaggttcctgtaggtcttccaacttttcttccccttcctttcacatatctcaccatccacccttcccaargtcaagacatagtgtaaaccaaaatagtgcgaccatttttaaagctttattccatcttttgtgccagaaccaattttgacagactcttctccctgggttagtaaaaggatatgcccttcctttcagtcttaccttctttgcagttggcttgacgccatctctctcctaagaaccagcacttcatttgatggcctgcttttattataaaagagatgggccaaaggttaaagaaatagccatttcaaaccccatgacttctgttacaaaatcataatatccaagcatttmcttgaagcatagaactacatgtaatgttatttcattgaggtccatcactttacccaatgttatacacattctaaatgggaggttatataaggctagggcaggacctagaactccattacattaggttgtggttacatgtgctcatattctctgggtcaagagctgaaccacagcatgaccagatccgtgtagtccaaataacaaggaagaatgattgactctatcttcatcattacaattatccccttttctgcctgctttttttcatattaagatggctttgtatttgacacagtacaacaggccttgctgaagatggttgcccttttgggagcactaatctttttggcagatactggtttccctaggcctgaatgaaaaggacattggtcacatgagcccttctgatatcagcagttcccttaacttacatgtgatttcatctgattaatacagaaagctaagaggacacagtgcggtagctatgaaatcactttagttcatctattaattctgataacsagtgatagaatctgtataaaatttctcctcatacaagcgtataatctggcccatggccacactcctttagaggctgcacatcatctaacattttagggggacctgatatattgaggaaagcgctggatgaagggaaaaagcagggatccctttctctggacctggtaccaacctaggttttgctaccgtagggaaatcacttcgcctcagggatttggactgagcgattcaggctttctctctcatgttgagtttttctacatccttcaagttcaagggtcatcaatgaggcctcaaagaactgacaggcttttgtaaaacatcatctacatagggagggcctgagtaggccccctgcccaccaaatagatgactaaagttaccagagccctggaagttgtgctgggcccagcagaccagagaactcagtagtgcacgcctctccctctgcagggcttcatgactcagaacactgcaaagcagaatgaacactgtcttaagaattttgacctcaccgaataccgtcaggtgctgagtgacctttccattcagatctaccagcagctcattaaaattgccgagggcgtgttacagccgatgataggtaagctggcagcaggagagctacatcactcatcatggtgtctgaaatgaggggaaggcgtggtcagcaccctctgcctttcgggaaccagatatcttagccatgacctccagaaagccagaaccttccagtgaaggcagaactgaggtgtgcacatcatgcttaaaaagctgtgaaagtatttgacacagtgcaagaggcatagatgactttccctttatctctttttctgtaatatgttgtattttttcccaaattttaatacataataaatgtaaactcaaaaggtacaaatgcatatacagtgaaaaagcataaccctcttaacctattatgaacttgattcatggaaaaaagcaggagtgttcatgcgaaaggacacagcagtcggcacgatgcatcagtatttattagacacttgctttgaaccaagcagtgtacttgggcactgaacatgaaatcagaattgagaaatgagagcagttacattttcaatcggaagaaaaatkatgtgtagatgcattactcactgtgctctgcaaaggctgggaaggaaagtgtacctggacctattcataatgctttccccaggttcttacaacacaagtaggttatgagtgaatcccaagaaggaccaatctagaaatacattacttgaaatgaggttcattccaaaccctccttcctgtctggaaatctttttataaggcaccagacagagggagaactgacatatcaagctggagatactcagaataatgtgaaggttaatagcagcagttctggagtcagacagacttgggtttaaatcctggccctgccactccctatcagtgtgacctcagacaagttatttaaccgctttatacctcaacttcctcataaaaatgggtagtactttatagagttgttggaagattgaaagagatactgaacataaagcccctggtgcataggtaatggmtgcttagtaagtatgacggaccaatgaagctcttatttacatagtcagtggctggacgaggatgacacccaggttgctcaattctcaaactgtggacttcagcacaggcgataccaaatcgagctggtacatgcccatcatctttgtctaattgccagtaaattaaatgaaaatgctgtccacagctgttttattccatacagaaatcaacacattagaaattttttgccaaatgttataagttcctaagcatgtcaacattgcacacctctggrtggtatcattgctaaagcccggagcactaaatgatttgagtggtccaatctttgcattgttagtggggaatgcaagcttctctaactgtgcttttatttcagtttctgccatgttggaaaatgagagcattcagggtctatctggtgtgaagcccaccggctaccggaagcgctcctccagcatggcagatggggataactcatactgcctggaagctatcatccgccagatgaatgcctttcatacagtcatgtgtgaccagggcttggaccctgagatcatcctgcaggtattcaaacagctcttctacatgatcaacgcagtgactcttaacaacctgctcttgcggaaggacgtctgctcttggagcacaggcatgcaactcaggtaagggaggagcaccccccaacaacacagatagagtgggccctcactgactgcagctagaatcagaacacaagactgctgtttctaaaaatgaaatccaaatctaattgacagtccttgtctccatcagtctgtgactcaaatccatcacctttttacctgttggtgaaatccgtcgaacactgagatggttgacttggtaaacaaattagttcaaagcttaaagatgttgacatactctaagttaaagactgaatacaaagcagataggtcagagagaaaactcaatgagttaagaggcatgaaggctcacatagaagtataaatacatttgtgaatgttaaatataaatacttacaattcagtatatttaatgcctgtttttccctgttaacttatgtagacacttcaggtatttcatctttgcttgattttaagtacccactcattcatttattcattctttattcaacaaatagttcctgagtgcaaggcacttgccatgctttttaaccgtgtgagataaataatggcactagctgcagcgggcctgcaaaacacaacaggtgtccccttctcagtgaattaggaggaccggcttaacatagcttgctttctacctatggctaaggtacaatataagtcagcttgaggagtggcttcggggaagaaaccttcaccagagtggagcagttcagaccatggaacctctgatccaagcagcccagctcctgcaattaaagaagaaaacccaggaggacgcagaggctatctgctccctgtgtacctccctcagcacccagcaggtacagtcactttgcacctctgtcaacatggtattccaaggaagccctgagtccattccaagtctgttctcrttggtggttatttgttagtgttgcactcccaccctttatatacccctaatgagacaattttgaagtgcagctgatgggatattcctagatgaaccaaaaaccatttggtctgtgaaacaagatgccacrgatactgttttctagtaactctctatccctcttactcacttaaaaagataaggtagcaaactcacaaaacgttaagtttaggtaaaaacttctttaaatataatgaattctggaatgtttcttacatagaaatccacaaattttcagaaattggcagcatcaggtatttgctytctttacaaatataactgtaagaaaaaccttttctttaaaactaattgcaatatggtcatattttcactcacactcatttatattgttttaaatgaagtcattaagaacttaggggcatttaagtgttactttccttttccctaaaaaatgtataaccatgattcagttgccgacacattgccagtccctgaaagataaataacaaaatccaaactcagtacagaaaaacacatcttaatatagcaaagtgaacacctttccttacctcctctgcttactattaaaatattaaatatckaactctttaaaaaactgcttccttctgtaaacatttccagaaagtcttcaaacatttttcttctctttaaatacatttcacttaaagtaagtttccttctagatgcagctggcattgcatttgggcagtctacttccaccaaaccagtggtaggcagacaaaagagtatctcctgttcaaatactcatttgtaaacaatgttgggggacagggggtagttaggtattaaacaagacctttctcatctaaggtaagatctccagtactcttcagaagaaacctttaaattactagtagatatgaggctgaggatttcaggcaactgcattctaaactcctcattgtgtataccaatgagcatagtggggaggggcaggtgggtttacaggagacatgagttcggtgagagggctcagatccacctgacaaagctgtgggctctagtttmctggatgcaggctccaagtgtaaatgtcagtccagctccatctgtgttgtgggccttgtctaaagaggatcatactcttgtaccaatgtcacatattctttaaagttcaaaagttgtctcatgttcatttagctctgtgctaaattccgtttttatccccaacagattgtcaaaattttaaacctttatactcccctgaatgaatttgaagaacgggtaacagtggcctttatacgaacaatccaggtgagttttaagatagtaattttataaagtccagtctacgactataaaggaaattaaaaatttgggctttaatcttgcttctctttattactaaaatactggttacatatatgctrggagaccttacattcctagactttctacttaggtaaacatgaaccgtatcacccatgagtaacttactgtttacacacagaaaactcaacttttatcatctctgcctctcagattatagacatagtttaagcattatgtcatttgccrctagcatgttactgaactattagcaccaaatggaattaacaatgtcagcagaatatcagccctaaccataaatggaactaagaaatgttctttaaagaaagcaatttgagctcttaaatctttgtctaagacttataatataggccaggtgcggtggctcactcctgtaatcccagcactttgggaggccgaggtgggtggatcacgaggtcaggagatcaagaccatcctggctaacacggtgaaacccggtctctactaaaaatacaaaaaattagccgggcgtggtggtgggcgcctgtagtcccagctactcgggaggctgaggcaggagaatggcgtgaacctgggaggcggagcttgcagtgagccgagattgcgccactgaactccagcctgggcgacagagtgagactcttgtctcaaaaaaaaaagacaatatttgcttttaggaaaatgcttgaaagaaaatgtattagggaaaacggttatttaaatctgtcttttcctaagatgatgggaatgttttacttaaacatgagcttccttaagctgagcccaaggtgatggctgagcgcctgacctttgcatgtgatagtaactgtgacagtgttggaatgatagtcatgtcgcagtgattcagaaaacaggccacacttctcccatgattacctgtggggagcacctcaggggagacatagcactccctcaaacttttaaatgaccttgttggccagtgaagggatattgacacaaaacaaggattaaaaaggggttcagggggaagtcatcagagggagagtcaggaaaaagggaaccaaatggaggtttatcaaagacactgaagaaacgtgaggaaacatggagctttgtacaagaacctgttccctttggaatactcctgggattttatttggagctccttayagtgtttcaatgtagatccagagatttagagagccctgaaaagagctaaaaaggggtttgaaaagagccatggcaaaaaaaaagcctaaatgaactttagcccagcatctaagtagggaacagaggccaacagagggaacgtctgggaagtggtgcctagtcagactaaaggttgttctcctaagggcaatgacagaaacacagtcgattgttaaagacacaggccgcagaatggggcaggcagagtgagtctctctactcaccaacatgtatayaacaatggggttgtgggtggcgctgacagaaaggatccagttaggatgctcatagtcagctgctgaatgggaagagtttgatgacagaagccactgagatatctgaacctggacccattatatggatttttatggagggctgataatttatacaaaagtgcaagtttagaaagtcttgtttagtttcgaatatctgagacacacattagagggagaactataactgctcataaattggcaaccccactgtttatgagaattcaggttaaaaaatatatgccacatcatactgcaggtttaatggatcaaggacaaagggaaaatataatggaggttaagcccaactattctctcaaaatatgtacagtcagattctgaatcttcctcagtaatcaatttcagtgtctcgcagttctagcaaaatatttttttcatgagctatagctttatgttgtttctayctatacaatgctcagaagaaatggtgaacaatcagtcctgccctcctacatttgaactcacatgtgtgataaagacaagttacttgttaaagcaaaccattgcttgggcgctctgggctttttatagctttgtactgacctttaaaaatgtaaatttgaagttgttaaactcaccaaagcattcacaggaggatttctgtgaaatgaccaccttatatactttaattgattaaaagtatacatgccttttgctgttgaattgtgataatataggtaatatttcactttcttttcccatttttatactctctaaaatttcttcaaaccctttaggtagtgaagtctactgtcacatctaactaatgtggagaaatacaagggcccttaagtgctacaaagatgactttttttcccagagcctcctgccatttcacattttacatacatatgccttgtgataggttcatgataataaacgcagcaaacctcagagtgggctgtgtgtgagctgtcaacaatcccagagaatcattctgccaggccacaccagagccatcattgagtaccttgaattagtgaggctagttgcttattcctccctaaatacctttctctcctttaaacttctctcccattatttcaaaccactttttcaaatgattaaaattactttaaaattttggcccatctttcaagatgccaaacacacgggtactggaaatttaagtcatgctttctattcataattcaggtaatggatgaaaacgtgggcaattctaggttcccctgccactatagagccatcttacagtgccatgctccagctgacttcattctgtaaacctatttcccagcgattttcaaatgctgctatgtatttactgactatggcctgtttcgaggtttaagaaaaataaattgtgttttcacaaaatcaggatatattgattttcctttttggcaatactcccacagttaaccctattgacttttgtaaaagtacagcttctaccagcagttcatggttcagaggtcratggttaatgcatgggcaggaggaacaaaggagcatattataaaactgataacagcaaatacagcacttactatgtgccagtgatggtactctgtgttctttacacctgttaactcttyaaatcctcacaaccttatcagaagggtactcttctccatcccatggttttggggtatgtgtgttccattttaaccatttttaagtgtatagttccgtggcattaagtatattcacaatattacataaccatcaccactatttccaaaattctttcatcatcctaaacagaaacactacccatttgggcaaataatattctcccttcccttcaaccctgggtaggcttctatatgtaaattctagatatcacatataagttggctcatacgatattctttcgggtctggcttatttcacttaggttctcaaaggtcatccatgttgtagcatgcataaaaacttcatttttttagtgactaatattccctttatatatcccattctgtctattcattggttgatggaaactgcactgtttctaccttttggctattgggaatcatgccgctatgaacattgttgcacaaggagctgagatcaatttttcagttctttggggcatatatttagaggcagaattactgggtcatatggtaactctatatttaactttttgaggaatctgaaacttttccacagcagctataccattttacattcccaccagcaatgcatgagagttccagtttccccacatcctcaccaacacttgtgattttccagctttttaaaattatagccatcttaatgggtgtgaagtggcatctcattgtggtttggatttgtatctctctgatgactagcatcttttcgtgtgcctattggccatgtatatatcttctctggagaaatatctattccagtatttaattcatttttaaattagattattgtctttttgatattgagttgtaggagttatttgtataatctggatattaaatccttatcagatatgatttgcaagtattttctcccattctgtgggttgtcttttcactttcttgatagtgtcctttgatgcaggagttttaaattttgaggatgtccaatctatgtatatttttttgtttcctatgctcttgatgtcatttttaagaaccataaatactttcccctatgttttctaagagctttgcagatttagctccctttaagtttttgatccattcagagttaatttttgtatatggtataaggtgaatgtcccacttcattcttctgtatgtggatatccagttgtctcagcaccatttgtcaaagacactgccctttccctcattgaatggacttggcacccttgtcaaaaatcaattgaccaaaaatatgagggktttttttttttctgggcccttatattctatkggtctgtatgtctgtccgtataccagtaccatactgttttgattcccatagctttgtaaaaagttttcaaatgggaagtgtgagtcctccaattttgttttcctttttttttttttttttttttttgagacagagtctcactctatcacccatggagcgcagtagtgcaatcttggctcactgcaacctccgcctcccaggttcaagcaattctcctgcctcagggaatataggcatgcaccaccatgcctggctaatttttgcgtttttagtagggaaggggcttcaccatgtttgccaggttggtctcaaactcccaacctcaggtgatctgcccacctcagcttcccaaagtgctgggattgcaggcatgagccattgcacctggccaattttgttatttttcaggattgctttggctagtcaagatcccttgaagtttgatatgaattttaggatttttttagatttctgcaaaaaacgtcattgggattttgatagggattgcactgaatctgtagattgcttatgtagtattgtcatcttaagtcttctagtacatgaacatggggtgtctttccatttgtttaggtcttgactttttcagaagtgttgcaccttcttggctagatttattcctaagtattttattctttttgatgttattgtaaatggaattgtttttctttctgattattcattactagtgaatagaaatacaactgatttttatgtgtttttttttattatgtacttcgctgaattcattagctctagcaatatttgtgtgtgtgtgtgtgtgtgtgtgtggattctttcagtttttctacatgtaagatatgttgtctgcaagaggatcattttaaattggctgcctcttatctcttttcttgtataattgccctggctagaactatactgaatagaagtggtaagaacaggcatccttatcttattcttgatcttagaggaaaaactttctgagtgtgatatttgtgatgttaaatgtggggtttttacatatggtcttcatcatggagggatttatctttttatcattaaaaaagttggattttggcaaatgcttttctccatcgattgagatgatgtgggttttttcctcttcattctgttaatgtggtatattacattgattgatttttatgttgaactaaccttgctttctgaaggtaaatcttgcttggtcatggtgtataatccttttaaccttttactgaattcagtttgctagtattttcttgagggcttttacatctgtatttataagggatgaatatagttttgttttcttacagggtctttatctggctttgatattagggttatactggcctcatagaatgagttaaagtgtgccttcctctttgatttttaggaagagtttgagaastggtgttaattcttctttaaatgtttgatagtcttcaccagtgaagcccatcttgggctttcctttgttgggaaatatttaattactaattcaatatgcttacttgttataggtctattcaaattttctatttcttcttaaatcagttttggtagtttgtgtgttcctgggattttgtccatttcatctaggttatccaatttgttggtgttaaatttttcatagtattctcttataatcctttttatttctgtaaaattggcagtaatgtcctcactttcatttctgatttgctaatttctcattttagtcttcccacacacctgtaatcccagctacttggggggctgaggcaggagaatcacttgaacctgggaggcggagattgygagcagagatcacaccactgcactccagcctgggtgacagagcaagaccccatcttaaaaaaaaaaaaaaaattgtcaattttttgaaccaactttgatttcatttgttttgggtattgatctgttctctattttttccatctaatttatgttatttcatttcttctaggtttaggtttagtttgctctttttctgattccttaaggtatacagttaggttattgatttgagatttttttttttaatgtagacatttacagctacaaactttttagcactatgtttatcccatcccataagctttggtttattatatttttattgcctaattccccctgtgatttctttagcccattggctatttgagaacttattattttccatatatttgtggattttgcagctttcatttattgatttatagtttcattccatcctaatcagaaaaaatatttcatatggctttaatatttttaaatttattcagacttgtttgaatattggagactgttccatatgcattgagaagaatgtgtatgctgctaagtggggtgttccatatgtgtttgttaggactaattggtttatagtgttgttcatggcctctattttcttattgatcttctatctggttctatccatgattaaaaatggggtattgaaatgtccaaccattactgtagaactatyctcccttaaagtctgtcaattctcccttcaaatattttggggttctgttgctagatgcagatgtttattatatcttcttgatgagttgaaccttttattaaaatataatgtccttctttgtctctggaaatgacttaatttctccttcattcttgaagggtagttttgccagatttagaattcttagcagacaagattttttcctttcaggatttgagctgtgtcatcccactgcctcctagcctccatggtttctgatgaaaaacagctgttaatcttatttgaggataccttatacagtcagccctccatatccacaggttccatatctgcagattcagccaaccacagattcaaaattcagtattcacaggatgcaraacctgtagttatggagggacaactttttctatctataggttctacagggccgacagcagtacttgcatatccatggatctgggtatctgtgggaattcctggaaccaatcccccatggatactgagggaygactgtatgtgacaagtcacttctttctcactgccttcaagactccctctttgtcttagggttttgacaatttagtataatgtgtttcactgtgaatctctttgcctttatcctgcttggagttcattgaactttttggatgattacatacatgtctttcatcagatttgggaagtttctggcattatttcttcaaatattttgttgcccccttcttgctcttttccttctggtactcctgtaatgtgtatgttggtatacttgatggtgtccaataggtctgttaggctctgttcatttttacctcattatttttattttcttctcagactggatcatttcaattgctttatcttcaaattcactgattttcttctgcctgctcaagtctgcggttaaacttctctagtgaatttttcatttcagtttttgtacttttcctaaaatttctggcttcaaataggaagcagggaggggctctgtgcctttaaattttccagttgatgccactagtggaagccattgcatcccaaggaatgtctaaaccaagacaggcatctgctgggacccaccagatcaaagggcacaaccccaaatttttggaggacaaggtcccactgcctaccctggccagctagctactccaggaatgtgagctgctatccccatagcttcaggggagctgaagagagggggatagtagctgggtcacacacacagttcccttagcaaagatcagcagcctctccctttaccaatcagtctcccgattgttataaatgtccaatcaagttccagagttatgagatagttgacaatcactgtttctacttcaaggtagcttcagtggagggaccaatccctagggcttcctactctgccattttatgtgatgtactcttctcccattctacaggtaaagaaactgaggcataaaaaattcaggaatttgcccagggtggtgccaggattagagctcagctgtctacctaaaaaaaaaaacccatgcccttggccacttcactatagtgcctctccatatggttkgcacctgagatgtattttatattctcccttagacaattttttaaagaatgctagaattgggagagtgcttacagccctctgatctccaagaagcctaagtcagggcttctctccccactaaatacctcaagggtgaggagatcacattctcctagtcctgaagttctacctaattgtcgtagaaatctttccatgatatatgccaactcacttttgtgaattcacttaaactggctatttttaggggtactcaaactttacatggtcttattcttccccataggcacaactacaagagcggaatgaccctcagcaactgctattagatgccaagcamatgtttcctgttttgtttccatttmatccatcttctctaaccatggastcaatccacatcccagcrtgtctcaatctggarttcctcaatgaagtctgaagaygcatgtttccagcattagtytgattcccaatgtgarcaaraaggaagtatakacagtaaagtaaattcaaggatctgttaaatctggtaaaagtmgatcaaatcagagattgacagcctgtggagggtgctgaactatacagaattagacacaactatgkcrttattttttgtacctactgctcagaataaaaacacttgaaatatggaagattttaagtttgatttcagtccaacacatatacataatttatagacaccaagcagtccccatagacatataaaaggtgtcaattctataaaaygaagctgcctagttttgatctttgcatagaactagagaatgtccaaattaaaataccaaatayatataagtcacataaattgccttcaaagggctttaacaaataatggtactaataaccatgataatggcatatactgacatttcccaaagtttgcaaaccataggtgtggttgagtttgtggtgagatgttttaagaacaaaaatatggggatgagacttctgagaaatattcccaaaatattttttaatggctgattatacacagacagtggtgtaactgacctccagaccagacattttgagtactggtttctgaagcaaaattagaagtgccagtcctcagtgtgctcaaacgcttttgtgttatcttgatttaatggaagagattattaaaatgctgctatcccaaactccaagtgagaaagatggaaaaatattttgtttctgatgctagtccatacactttccaagtcccacaaaactttcacaaaaatgtatataagctaaatattagaaacggataacaaacttgttttatttatagatgtaaaaaccaaacaartcaatatgaaagcttttaatctcttaataccattaagcttccagtaagagcatcacataatgctctactgttccagaaaccmaatagtaaaacaaactaaagttcgcacatcagatcatctgaaaaaccttcaaaaataatcagttcagggatattatacaaaagtttgggttttttttttttaagagaataaaatggcttaggtcaactttcccttttcaggttattttcaacgtttttcaaatttagcacacaaaaaattgtaaatatctctcccacaaaataaggattttaaaaaagtaattcagtaatataacaggcttagatgtttgctgctcttagaattttttttaacttgtttttggtttcttcaaaagcaagcattcaattggaaacccatattctttccacacttttttttactgtcttttctgtatttcttgatagcagtatgctgttcccataagaaaaaaatggtatttgcaaatcatggaagaacagcctctgtattacattgagaaaataagatttatccatgaattggaagtagaacagcctgccttcaccctcttttactcaaccacccaacttaaaaggctcttggaaacacagcacactccacgctaccttctgcactgtgcccttagagcacagcttcctcagttgttctctgcatctcctggggcttaggccagtcttagcctgggttaagkctgctgacattgtgttccaatcagttgtcatgggcattatcccctctacatccacattaaacatgccggcttctcttgggcatckgcagagctgtgcctttttctttcagttacagttacrtaatcactgacgtccatgacacttacccatggatccatgtgctgacttcatttagaaggccaatctaaaacaactgggtttgtggctacctctttaaagttgtttgtgaaggataatttgttttttaatgcactttagtttgaaagtgagtctcttatgtaaggaccatccttaaaagaccaaaaatgccttgttagagtgttaaggagttttgacatgcagtggttccacaaacacagtggcttactatccttatacactgtcttataccatcattctctccatctctcttggtcactactctctgctgtcactggttaatcactaggtgccaagagcttactgaataaaagcttggcaattagaataaatggggagggaaggaccttatgaatagtccatttagcctaagaaatggcagatttagttcttctcttccaaaagataaaggtatatcctggaattgtacttaaaacttacagatgactaacaaatatatactttatatgtagttaatatttagatctgtcttmtttaatacttggaggctagaagaagcatctttaggggaactatataatcttttgttagcattttctctgcattttaaaaaatcatttcaattcaaacatttatcagtgtcatgaaatcagtaatgactctttaacaattcaggtttgaactctgcattagatgtctctttaattttttaatatttaaaatttagttgacatttttttcaccaggtgcctttagcggttactaagataactgacatcagttgtttctctgaaataagtgttgctgtgggaataattttaatgttcaaggtgatatcatgggggagttttgtcttttaaaacattagaagcattttaaatattaagaatcaaatatttatagatcaaaacttgtgttttaagtattatacgggacctgtttacttatagtaaatgtgaatgtacacatgagttgttgctgaagctgacaagcatattacatacatgcattttccctgtgccctcatagttgcagttagmgttccagtacctgtaggctcacctgggaggcagattagacccaaaggtagatktttttcccctttccatgaagcatgtcagtgggagttgcttcctttgatttccctagtactaaattttaaggcttttgtaaaaacaaaacaaaactaggagcttggaacagttaaaaatcaacactgctaccatcaattcatcaaatatttacttagagctttcatacattaagattccagtaaccaataaattagaattcatttcttctgcataaagtaaattttcatacacttgacctactaagacagcaagggtgtcctaaattgaggcatttgtataatgcctgcataactaaatggtcactaaaatgggacagcatggggcaagaccttgtagttcttcacagaatatttgtggtcagtttctccaattaatttgctgcatgagccaaataaccataattcactttttatacccactggtgccataattagagaattagagggtgtagacagaggttaatgccaatgagaaacacaggacagggttttttttattataaaggtcattagatacaaaagattgtttttcaaaaaatttctaattctaacaaaggggatcaatcagaaatgaaactaagctactttctaaagtgacactgtatcagaataatccagatttgaatataacattttgccaccaactgacatttagatgaaggactgcctctctgaaagagttcagatcatattcaggggtgaatccaacaccatggaagaaagactactgatgaaaatattttcccactttgcacaaatctgtaaactacacctttgtttatagaaaaatgcttgtaatagtcactgtaatatttagctgtggataaaaatttgtggaaataaatacttttgaataaagaggtgtgccaaatctaaatgaaatttaaaactctgcagctacaggttgacaaagtttctttgtaatgctctcttgagaagcttcattatggggcctatattctaatacgtgtcaagatcatttaaaccagaggtcagcatcttacagtccaaaagttgggggcagggagaaactctcagataacaaggcttattgagcaattactttaaagctatggaattaaaggcagttttggtgtaggcaaagacaagtagatcaacgaaacagaatagggagtgcaaggataggcccaatcctatgtataacatagcatacggtagagatggcatgaaaaatcagtggggaaatagtcataagatctgtatggaggaatttgtaaaatataagtgaaaaacaatgacaacattaaaatggagaaataattaggtacaagaattcgaagactccataccactaaaagtttgtcagttgtccccaagttgatctatagattaaaaatcaaaatttcaactgtttctatgtgaaaactgacaagctcattataagatttatatggaagagcaaaggcccatgaataaggaagaccctccttgagaaagtgggaagctttccttagcaggcattgagacttacaaaatttcagtaattaagatgtgtgaggatgacagacatggaaattttttttttttttttgaaacagagtttcgcttttgttgcccaggctggagtgcaatggcacaatctcagctcaccgcaacctccgcctcccaggttcaagcrattctcctgcctcagcctccctagtagctgggattataggtatgtgccaccatgcccagctaattttgtatttttagtagagacaaggtttctccatgtctgtcaggctggtctcaaactcccgacctcaggtaatccacccgcctcggcctcccaaagtgctgggattataggcgtgagccaccgcgcccggccctggatgtggaaaaattgaccagtggaacagaatagcccagaaactgagcatctatatggaaatactgatacattttttcttaactgggagtacacatcaaaatcacctggaaatctttaaaaaaatttacacccaaatttatggaataagacacctccagagatggtgcccttccacacccattgttaacctgacccacctaaaaatatacaagaagacatccccagggatggtgcccttaagcacccatcattagagaccactattgaaatatttcatgatccagaaaaatggtcacagtataattagtcctcaacgtcactgataagttctaggaaaccacgagtataaacaaaatgacgtaatgacaccaattttaacataagctagttgatataaacagttccttcggcatatttatggtcatacaaacatcaccaaatttttttttttttgagatggagtcttgctctgttgctcaggctggagggcaatggcaagatctcagctcactgcaacctctgcctcctgggtttaagtgattcttcctcctcagcctcccgagtaactgggattacaggcgtccgccaccatgcctggctaatttttttgtatttttatagagatggggtttcactatgctgtcccggctggtctcaaactcctagcccccagtgatctgcctgcctcggcctcccaaagtgctgggattagaggtatgagccaccatgcccggccaaaacatcaacaaacttctaaataaagaccaaaacacttctagaattaaacactgaaatgaaagctatatatacwtttgagaaagattaataaaaacaaatgagaaagttgcccacttattccatttaagagtcactgagggcccacctctcctggcagctcagggtgccagggaggcaccaggcctggacaggaaaccatcctgtcactgggtgtgctcacaaacccacactcagactgggatcacttagacacatccattcacctcatgtacacagctttaggacatgggaggaaatgagaatccaaagaaaacagtcatggggatctcaccagtggaacgtatccatgtctgtatgaatgaggctgcagcctcaattcttgccacctcagaagaaagaatttgagggccgtacagcagaaggagagaccaaggcaagttttagaataggagtggaaaggcaggaaagtacacttggaagagggccaagtgggtgacttgaaagagtcaagagcgtggcttaacctcttgacttggggttttatatgttggcctacttctgcggtcttgtgttacttctctcaactcctgagatcttgtcaggaagtggctgatcaccagtttcatgtgttttctatcgggagactgcctttctctgatgctggctgcgaccaatgactactttagaaagacagttaacaactgccttgaccatcactggatggtcacaagatgctcctggtgtgtgtgtggaggggggagctctctcctgccctgctcatgcctgactaggtacccactgtaacagggagaacctgcaaactccacacacacagtggccctggccaggaagcaattctttttttctcaccaacattatgtcaaaatgacaatgaatgaaacaatgttatgtagggacctgctgtatactatgcagtgaaaagttgacttttgaaaccaccttccaatctaaagatggattcactttttgagtggctgaccaaagaataccctcacttgaggaaagccttcagctcattctcaaagaggtttagtcctagcttcaaagcctcaacaggaaaaccacatttgaaaagaagcaaatttcatacaagatacacttaataacagttcagaaagagaaaagcagactgacttccaggaactgatttgaaactcagagctaggcctgggtcatgctagaagctggcctggtcctctgtgctgggccgtgttgttcttttgctatgaacaaccttataaaacaccaatatcagatgtggccactctgactacactaaagtgatatgaaacaagactgtaattttgcccaggcacaaaaacaagatcactgtgtaaaccatgtaacaccaaatatgccctgtcccaggtaatatgagggactgtagctgctttcccaggtgcagcttgagcctagctctaatcagccctccttcaggataagatgatactgtgacggttaatattagttgtcaacttgattgaaggatgcctagatagctggtaaagtattgtttctgagtaggtctgtgaggttgttgccagaggaaattaacatttgagtcggtggcctgggagaggaagagccaccctcagtgtgggtgggcaccatgcaattggctgccagcgcagctagaacaaagtgggtggaagaaggtgggataagctggcttgctgagtcttctggctttcatctttctccygtgctggatgcttccttccattcctcctgcccttggacatcagactccaggttcttcagcctttggacccttggacttacaccaatggcttgccaggagctstcaggcgccctttggccacagactgaagactacactgttggcttccctacttttgaggcttttggacccagactgagccattcctggctgagcctgctgatggcctattgtgcgacttcaccttgtgatcctgtgagtcaattctccttaataaactccctccctccctcccctccctcccttcctttctttcttttgcttttttttttttttttttttgagacggggtcacagagtctcgctctgtcaccaggctagagtgcagtggcaccatcttggctcactgcaacctccgcctcctgggttcaagtgattctcctgcctcagcctcccaagtagctgggactacagatgcacgccaccacgcccagctaatttttgtatttttagaagagacggggtttcaccatgttggccaggctggtctcgatctcttgacctcgtgatccacccgcctcggcctcacaaagtgctgggattacaggtgtgagccaccaggcctggacttaaactcccttccatatatacatatgttctattagttctgtccctctggagaaccctgaatagtactgatacccaaagacttgtccctacttcctgacagtacccaatccagagtgaacccgtacttccttggatcctccccaaatcacctaaccaaaccccaaatcctaccacccttttactgagatgtgctgcagttcccaaaggcacacccatgatgtgcaatctcccttcttccaaagaacattaaacccaacttgttcaactataggtgtgtttctggaggtttctggctggaaggcaacaacagcattgtctccttctaccaacattagtattttgcagagtaaacttagatccaaggaagatttgcctaaggttatgctactaaatgaaagttgagccaaakatatagaagctgcaaataactttcagacaagtagagaaaaaagaaaaacaaatatctatcttaagtttgagacagtgccttagggttactgggaacacatcaagacttagggtaaacttaacatgagggagtttggcgtattggtgtctttattacttcctgtctacaytcccttagaataggtagctaggcagacttgggcagggcaggagaaaacctcccccaccccgcccaggaatgtcaagcgactatcaggtgatggtcaggcaagttgttaaactatctaaaataatcattcgtctcaactggcgtcagggaaaggcattctcccaatagatggaaaatactagaatctggtgatcagcagcttgtggataagattttgggagagtgggctcaaacatgctcactaagaggcaaaatggtagagtttaactggtatatgagcttcctctaggaacaagactggtaagggaggaatgtctctagtgagtatgtgcacaacttcagtaaacacactgcacatgccgcccctcccaagtgccggcaggccactgagcatgccgacagcccaccccaagggaaaaatcggaagaagtaatgcaaggcctagaaccgtaccaatgtatcaatccccaaatcaagggtcaggtggcacagctgaatctctcaagttgcccacttggccctcttccaagtgtactttacttacttttattcctgctctaatacttcttaataaactctcactcctgctcaaaaacttgcctcrgtctctcactctgccttatgcttcattcctttgaggaggcaagaagtgagttgctgcaggccagtacggatttgccactgcgaacaatttcattcatctgatgttcttgcttggcaacttgaactttctgaagagttagtatttgttttaagaataaaaccacattcaacatttgcgttctaattaacaaaaattgaagtatttccaaagcaattagattaacagtgagcacacacataacgttccaaactactcaagatcagcaaattcacttatctcactcattcagattcatatactcatttttaaaagttrtcctaggccctactgacttcgtcagctttccccagtttccattactgaaacttctaaagccactgctgcttaagccaccgtcaatttttagtgttataggaaagcaggagaaactgtgtttaagcataggaaaataagtaaggaaatgataatattgcatttataaaaatactgagagttaaatgtctaaaagtagaacaataactttacatctcatgaaagactccacatctagacaaaaattatcacaattttaatatacatattaaaattacaagaatacatamctgcttaaacatgatgtaaacctgaaaaggactaaatattttcaaaaataacttgtttcaagcaattttgtagcttacgtgaaggacattttttatcccaacttctattttgaaagagttaaaacctacagaaaagttgcaaaaatggaagaatgtggtacacgcctgtagtcccaagctactcaggaggctgggacaggaggatcccttaagcccaggagtttgaggccagccctggcaacatagcaagcaagactcccctcttagaaaaagaataatgggccaggtgcagtggctcacgcctctaatgccagcactttgcgaggccgaggtgggcagatcacctgaggtcaggagtttgagaccagcctggccaacatggcgaaacctgtctctactaaaaatacaaaaattagccgggcaggatggcaagcacctgtaatcccagataatcgggaggctgaggcaggaaaatcacttgaacctgggaggtggaggttgcagtaagtggagatcatgccactgcactccagcctgggcaacaaagcaagactgtctcaaaaaaaaaaaaaagaaraagaataatgaacaactgtatattcttcatttggattccccagttggtaatatttggccatatttgctttatctttctctgccagtgtatagtcatgcactatctttcctatgtttagatgcacaaatgcttactacttgctacaactgcctacagtgttcagtagagtaaaatgctatacaggtttgtagcctaggagcaataggctgtaccatatagcctaggtgtgtagtaggctctaccattgaggtttgtgtaagtgaaatctatgatgttcacacaatgacgaaatcgcctaatagcacatcgttcaggatggattctcgtggttaagcaacacataactgtatatatataaatgcattttttccagtcatctgcaagctcatgattcttcacccccatatatttcagtatgtatttccttagaacaaaggacaatcttctacataactacaatataattatcatgatcaggaaacttaatgtcaatattaccatgtcatctataatttatatgtttctccagttgtcccaatactgtcttttagagtatttttttaacccaggttttaattaaggatctcatacaatatgtgtcacatatctagtctcctttaatgtgatactattcctattttagccattttttgtttttcaccacactgatgtttttaaagagttcaggtcagttgttctgtggaatgtacctccatgtggatttgtctcattgtttccttataattagattcaggccagatgttttcagcagaaattctacgcaagtgagattgtgttgtcgctgtagcaaggggagcgcatgacgtcagtctgtccctttattggtgatgggacaccattacttcataatttggtgaagtaatacccgcaagatttatccattgtaaaggtaccctttcctcttcatgagacttggagactatgtcaatattctctcatatatttacgtgttttaatatatgtaaacctttcactgaatggtgttagaatccactcattagtgacatttccaattagagaaaacacagtacatctataaagacctactgatggtgatctgcagtgggaagttgtgatacttaacctttcttaaatatgtagaggcaaactgaatagaaaactgtgtacaaaaatgaacactctatacatgagcattttttttttttttttttttgagacggagtcttgctctgtcacccaggctggagygcagtrgcacgatctcggctcactgcaagctccgcctcccaggttcacaccattctcctgcctcagcctccccagcagctgggactacaggcgcccgccaccacgcccagctaatttttytgtatttttagtagagatgaggtttcaccgtgttagccaggatggtctcgatctcctgacctcgtgatccgcccacctcggcctcccaaagtgctgggattacaggcgtgagccacggcgcccggcctatacatgagcatttgtgaagcttgtctaagatttgtacatttgattgcgtggatattttgccttaaaaagaactgtaaatgaataatgtgtgctgatgtgttcatgggtgtagagtactaaggtctgcattaaaaagataagatggtttgatggaagaacaggtggatagcaatatagcaaaatgttaacaattgggtcgatatgtgtccactgtacaagtcttcccacttttctgtaagtttgtaagttttcataatacaaatttggatttaaaaacaccccaacattgcaagagtgtcaccaaagtgtttgaaaagcaggattctagggggggcattcgctgacgactcagagaaaccgtccatgccacccaccacccctacgcactcaaaagaagccctcgctaggcagcccggccctccgagccctggtatcgaggggctctccgcctctcccctgccgcggccgcctcctgcttgcccggcctcagtctgttctcagaacatactccatcacctggttcccaraactcagattgcgcagtggtctcgtcatcatcggccaggactcacagtgcccgcggcagaggcctccctagacctccctcccgtccagcctcacccgctgcctactctcctcacgcccctgctccaggtcccctggccccatttcgctcgccacgttttcataatcctctcaggctccgggcaagcggcgccgcccgcaatgggacctgatcatataaggaaaatactgcgggctcatccgggggctgcaatggggacccgaaagcgccctagcctactacaatcaccgcaccccaactgccgcccacctctctgccctgcccccagtacagtacccaaaaccggtccgggtccagctcggcggcccaagcctctgcccagcggactgcgcacccgcccgccccagccaatcccgccgccgccgccgcgccccgcccacaggacgttcggtcccgcccccagctggcggccgcggccgcccgcgcgccaagttcctcagcccttggctcctgcccagtgtttagggtgttggcggagacaaaggggaagagtcatcgcctgtcggggctaggatatgatgggtgagaggtgtcaaaccaaattctctcggkttggaaacggagaaaatctaaaaatgaggatgtgaggaaagagtccgctctcaaggcgcgttgtggtctatccgagccccgtcccctgggctccctcgggctggggtgaggcgggcagcgctacgcgtggggtaggaccatcttacgctgggaccccgccaaggagccccaggaagtaggtgaaagggcaggggcgtggctctcggggcgccacccacgctcttgaaatctgggtgattgcgagcggccgctcagcgtcccccacaccacagacccgcgccgccgacgacccagcagccgccatggctctgctccgaggtgagcgcagccccctcctcctctcctcgcccctcggggtyctgccctccccaggccaggcctccgcttccggccgccgcggagagtcggggtcgtggggtgaagttcactcaacctcctcggttttggagcggacgtgataaaaacccagcccgaaaggcttgtttgggttaaggagaaaacccttacttgtaaggcgctagcgacagcgatttcggtgcaatttcctgtttagttgagaccaaagtttgcttgcatgtgaccttggaggtcattcctttcttcgcctaacagtgaccccactagttcgagtccaagtattagaaaaaatggggcggcgccataggccgcgggcgcctgctgcggggcagctgcgcacaggagcccgccgctcggcctcggtggtcagggctccccgggtgaatcgatggagaggcctgcagaaatggtagctggtgttctgctggaagacctgccctgctcccatttcccttctgttgctttagattagagcggtcactctatacctaagttctagggttatgaacttgtttaaaacaactgtgtaataaactcccttttcaaaacaagtgggcacagtcaatggaatcttactttaaggatgtacgagtcgaagaacattgaggtggaatacatatcgaggccctgagacaggaaaaagcttggcaggatctaagaaccaagcattttggtgctccagggccctgtgggctctgtaagaaggtggggttttgttccaaattcagtggaaggcaatacagggatttaaagcggggtaatgacaggatctgatttccactctgtccgaatttggggcggtctgtgtaatggcgaagagaccatttaaggatctattgtagaggtccagggagcagcaaatgatggctttgactcgtgtggggcagtgtaattggggagaaaaggggagggatgagttgagatagatttggaggtggatttgatagaaagtggattggatgtggtggagtaaatataagaaggaaatgtcgagaatgatgaaaagtgtctggtttgatgaaccgtgttcatgatgatgccacttacagagtgaggaaaattgggaaaggaatagatgtggaaagaaggattgagaattcagttttaggcagaaaactttttggtgcctgtgaagcagccaagtggagatgccagctaagcattggttagggggatctgaaagtgagaagaaccaaagtggcatgggaacaaatcaagggaaaaatccgtattctgggaccaaatgcagtgtttacagtttcctgcaacgtggatttcatttgccagtgcccttcctgactgaatttactacatttacttcataaagcarcgtggtgaattttttttagacgaggcatttacacttcatttaaaaggtgcattgtcatgagctatcttctaaaaaaggaaataatatttttactgatatcattttaatattttatcagtggttcttaccctttcttataatacagacctgtttgaaaatttcacaaatmctataaacccaaaaaggaaaaaaatgcacattgacacctgtattaaggaagtataaagtttataaatttctggtacaatttactgtagtgttagagctagtgatygtatttttttccatttccttattgtagcaattaggaggacactcatgtcgagagaggtaaagtggttgtgtataataacacaggtagttagtggctgtgactagaacccaagctttgagcttgaaatagtgatgttacaggccagctagaatcattaaagataaacttctctcaagcagcataccaagtgtttgcaggatgggtgggaagaaagaagagcatgtgactgattatagggaaaaggacacatttgagttaaattttgttaaggattaacattaatttgtcagatttcagtcaacaagaagaaccggctcctaggtttttattagcacccatcccagtacttggcaggaggktttcgctcgacagatcatagctctcctactgctcctagctttgttgggaatgtttgtgtattttttcaaggcaagtagacagggctgctaaattaccttaatcttgaaacaactggatgccaccgcagctttccttaatttgccctcgttgctgcctgaagttgctctaagtgaatatttacctaacaatgtgatagaaaggtagtgctcctgtttctttcctagtggtgcttttcctgtattgtcaactcagcacatctttccagggcctttcttggagctacttggactcactacactctgggttaataggtctcttcactgtctttcagttttgggaaatttttagcctctgaattttcagggtgttcaaatgagatttcagtttggtgttaaagattgttaagttttagaccttttagtatccacrtaaaattgacatcaaatgaaaattgacatggtatacaatttatgaaattaaaaaaaaaaaactttaaacctttatagtctatctgcacatcccagattatttgttaaaatgaagatttaaaataataataacaaattattttttaaaatagagaaacccagtctctacaaaaaatacaaaaattagccaagcatggtggcactcgcctgtagtcccagctactcgggaggctgtggtggaggattgcttgagcccaggaggttgaggctgcagtgagccaagatcacactaccgcacttcagcctgggtgacagagtgaaaccctgcctccaaacaaacaaacaaaaaaaacccaaaccaaaaatatatgattgagaacattttctctgttcaaaataattgttttagttcagttaaggtcttacttgagctaacctttacagtctgggagcatcaaataagaagtaatataggtaaaggggaggtttttttttgtttttattttcccatgcacaccctttcctttgtagatattgcatatttcactactagcactgccctatcaaatgctttcttagaatatgagacataggggagaagttcataaaaggaactttgtagagagacaaatgaaattaggctctattgtttctgagaagtgaggggtcatttccatgtgtgcaatatgtcatttttatttctggatgctttatatatttttgttatctttggatttcaaaagtttgacartgatgtgccaagctgcaggagaacggggtgtggagtgttacgtgtggtgtttattagagttgaggtttaccaagctttaatatacaaatttatgttttttatcaaatttggaaatttcttctttattatttctgcaaatgtttttttaaatccattctctgtcctctcctatgactgtaacttgttagtccttgaggttctgcccgtgtttttttactatccgactttaaagaaaaaatttacaaactttgtttttgagcagatttaggttttacaaaaaaattgagcagaaagtacggagtattaccatgtgctcccttgcccggtccgtttcccctattattaacattttgcattagtgtggtacatttgttacaattgatgagctaacattgatatattattattcactgaagttcatattttgcattcaagttcattcattgtattgtatagttctatgggttttgacaaatgtgcaaatgaccgatgtcagtattatagtgtcatgcagattaatttcaccaccctaaacatcatctgtgattcacttatttatccctgtctctgaacccctggcaagcactgatctttttactgtctccatagctttgccttttccagatatcatgtagttggaatcatacagtatatggcctttccagactggcttctttcacttagcgacatgcatttaagattccttccttttatggcttgatagctcacttctttttattgctgaataatattccattgtatggctgcaccacagtttgtttatccattcacctgttgaaggacattgttgtgggaagtcagggaccctgaatggagggacyggctagagctgtggcagaggaacataaattgtgaagatttcatggacatttatcacttccctaataatactcttaacgcctgtcttactttaatctcttaatcccgttatcttcgtaagctgaggatgtacgtcacctcaggtccactgtgatgattgtgttaactgtacaaattgattgtaaaacgtgtgtttgagcaatatgaaatcagtgcaccttgaacagaataacagcgatttttagggaacaagggaagataaccataaggtctttactgcctgcggggtcgggcagtaggagccatatttttcttcttgcagagagcctataaacggatatgcaagtaggagagatatcactaaattcttttcctagcaaggaatgttaagaccctaggaaaagaattgtattcctggggggaggtctataaatggccgctctgggagtgtctgtcttatgcggttgagataaggactgaaataccccctggtctcctgcagtaccctcaggcttattagggtggggaaaaaacgcttcttggtaaatttgaggtcagaccagttctctgctattgaacactgttttctgttgtttaagatgtttatcaagacaatatgtgcacagctgaacataggcccttatcaggagtttttgattttgccctttgccttgtgatctttgctttgtcctttgccttgtgatctttattggcctcagaagcatgtgatctttgttctcctttttgccctttgaagcatatgatctttgtgacctactccctgttcgtacacctgctccccttttgaaatccttaataaaaacctgctggttttgtggttcaggtgggcatcctggacctaccgatatgtgatgtcacccccggcggcccagctgtaaaattcctctctttgtactctttctgtttctcagaccggccgacacttaaggaaaatagaacctacactgaaatattggggggcgggttcccatgataggacatcgtggttgccttcaagttttaacaattaggaataaacatttgtttgcaggtttttgtttgaacataagttttcaaatcatttaggtaaatacaaggaacctgattgctgtatcatacatatggttaggtgtgtttagttttataagaaactgccaaagtgtcttccaagctggccataccatttgcattcccaccagcagtgaatgaatttctgttgttccacatcctcaccagtgtttggtgttgtcagtgtttgggattttagcctttctaaaatccaaaagacyaatagttgtgtagtagtatctcattgttttaatttgcaattccctaatgacatacaatgttgagcatcttttcatatgcttatttgccatctgtatatcttctttagtaaggtatctgttcagatcttttgcccatttttaaattgggttgcatgggtttttttttttttttttaattgctgagctgtaagaacactttgtatgttttggataccagtcccttatcagttaggtgtttttataaatattttctcctagtctgtcgcttgtcttttcattctcttaacagcatcttttgcagagcagaggttatttattcatttgtttttagagggtcccgctctgtcacccaggctggagtacagtggtgtgaacacggccactgtagccttgacctcctgggctctagcagtccccttgcctcagcctcccaagtggctaggaccacaagcacacaccaccatgcttggctgatttcttaattttttatagagacagggtcccatcatgtctcccaggctggtctcaaactcctgggctcaagcagtcctcccaccttggccttccaaaatgctgggattataggcatgagccactgcacacagccagaagttttctattttaatgaagtccaacctaagttttcccttcatggatcctgcttttggtgttagatctaaaaaattatcaccaaacccaaagccatgtagatttttctcgtatgttctaagagttttgcattttatatttaagtctatgatctctttgtttttgtttctgtttttttagataagagatctcactctgtcacccaggctggagtgcagtgacttgattgtagcccacggtagccttgaactcagcctcctgaatagctgggactacaggcacatgccactatgcccaactaattttttacattttttagagatggggatctcgctatgttgcctaggctggtttcaaactcctatcctgacacagtcctcccacctcagcctcttgagtagctgagattataggcttgagccacagtgcccagcccactatcaaagttgacgcatttttgcctggattcattttgtttggtatatagatgttttgttgttccagcactgtttgttggaaagacgatcctttttccagtgaattgcctttcctcctttgtcagaccttgaggttctggctttgttttttaatcttttttttttcatctgttcttcagattggttaatttctatttatctatcttcaaagtcgctgaatttttctcctttcatttctattttgctgttaagcccatccagggaattttttatttcaggtattttccagttttggaatttccattttggatttttatagtatgtatttctttactgagatgtcctatgttttattaggagcatattttcctctacatccttgagcatagttgtaatagaatgctattttaaaatccttgtctgctaatttcagtgtctgggtcttcttgggattggtctctgttgattgtmatattttttgtttcctcatatgtggattaactttgaattrtattatgaatattgcagatggaacattgtggagactggattctgttataatcctgcagacagaactgacttattgattggttggctatttattttttgtagacagttactttgcctacaaaatcacccccatgcacccccgtgataaactatgtctccccttgtagtgggcagcagcttaaatctaagttcagttttttaaggcttggcttaggtgcttgtggtctgacctacacatgaatggctaaggagtcagccaaatatttgggcagagtttatatgtgaaatttggaatctcgctctatggtgctcctctttcccagattctcattcactttctagtggctgtgcttaccatgaattttattctctgattcttcaagccagtaagactgtttctgagttctagccattccatgcatcatggactgttagtcttcaagttagttgctataaataaattggacacttaccctgttctgttcccttcctctaagtatcaactcttctccttacctgtctagttttgttcatttccaagaccgtcaggtagtagttgttcttatatattgtctggagtttttcattgttatctgttggagggttggtcagataggagcatagtaggccatgaccagaagcagaactaatgaaattaggaagaaggcatggaaagaggaaagaagaatgaaataaagcaaccactgataggccaggtgcagtagctcatgcctataatcctagcagtttgggaggccaaggtgggaggattgcttgagcccaggagttcgagaccagcctgggaaacatagcaagaccccatctctacaaaaaaaaaaaagaaaaaaaggtaaaaattagccaggtgtggtggcacatgcctgtagtcctacctacttgggaggctgaggcagggggatcacttgagttgggaaagtcgaggctgcagaggtcgaggctgcagggagctgtgatcacatcactgcactctagcctgggcacagagcaagactgtctcaaaaaaaaaagaaaacactgatataaaaataggcagagactgttaaggaaggaggatgaaaggaaacttgaaaagattcaggaaggcatcatggtacagaataaccaatttaccagaacaaaacgtttgtaatgcactcgactagtatttatggcctttkgtaactatctgaatttgtatctgtaaaaaactgagtggatctgttctaaattatagttatatatattgctcctaatattcctttaaactgcaaatttctcaaaataggaatgaaaagagaggttgaaatagaaatattttaggctaggcttggtttgtttgatgaaagagatcataaactggaagattatacttagataccagtagtggtataatgcttgaatagtctcatttgtagatcagtatcttatcacaaacccattgccgaaagtcccataatttcttgacaagatgtggaaatgtgagcttagattgtcttggagagaataaagttagtatatgcaaagtgctagcatgaagtctattccatagtaagtgtcccctctatgttagctrtaatatttaccttgcagagttgctgggaagattagcttttgtgtggaaagtgataaaatgtctagtatttagtagacacctaatgaatgtcaatatgatgaaatggctataactgatgctgcttactgatatgccggttttgcactgtacagctctaatgatgatgagtgggtaccactcacatcataatcatatatttgtatagtcacaagtttttttttggcagatggtagtaggtgattgggaaggggtgatttttatttatttgtacaaggacaccgatttaactaatagtgatgctgcaaatttatagtcttagtttgtattagtagatgtatagataattcctctattctttgtgattagataaaatgcatgctatttttgttatattcttatattctaagggacacattttaataggatgttggcaaactacagtgtctttagaggaaagcagtcagaattaatgtcaaataaaaaactattgaaagaatgcctttaatttacctgagatgagagtcactaggtttggggacttacaggttagctgacttcagatactggaggtgggggatacacatgtagaaggtaacctgttttgcccattttttttctaagagtaaaagataatagttcaggttatttatttgaagtctgtaacttgagtcatcctgtgactctagaaccggtagcagcatatattctagaaactacatctctatctgtgttggtgcttttggagagaactagaattggtggatggaagactttgtaagctgagttagttcaatataaagaaatatcattcgttggggccgggagtgggtgactcacgcctgtaattctagcactttgggaggctgaggtgggtggatcccctgaggtcaggagttcaagaccagcctggccaacatggtgaaaccccgtctctactaaaaatacaaaaattagccgggcctggtggtgggtgtctgtagtcccagctactcgggaggctgaggcaggagaatcacttgaacccgggaggcggaggttgcagtgagccgaaatcgcrccactgcgctccagcctgggcgacaagagcaaaactctgtctccaaaaaaaaaaaaaaaaaagcaatatcattagtttatgttgtccatgaccagcacactgtttcatgcagtagagtatgccctcttactgaaagtttcctggcagaggtttagagagaaccttttgtcaggaatttttagaggtagttcttatagagtgagtggttgacctcagacaaccctaaggcaccttctagtttggagattcttttattctaatactaggcaatatactccagcacatagaagaaggattttagttctcaacatatgtttctagcattgtgaagcatcagagaacaagaaagttgtctaaccagaatggctttacatcacagtgtagcaggacgagccacrgtcaaaactcctcagacactggattaaagaaggaagaggctttatttggcttggagcatccaccaacttgcgtcttaagagccgagctccctcaaaaagaaattcttggcccttttaagggcttacaactctaaggggtccacctgaaaggatggtgatagatcaagcaagtgtggggaacgtgactgggggctacatgcattagcttacagagcagaaagttttgcaatgctttttcatacaatgtctggaaattacagataacacaagtagtttaggtcagggattgatattattattattattattattattattattattattattatwattattttaactaccagggccgggtggtggcaccaggccatctggctatttatcttacttctgtttctttttaactttttgcttttttcttttcctcctgttttataaactaggcaaggggggcggggtgcgcaggagaagtggtggtcttcttccttaacagcatgcagtgcagttcttggtacctgcatgtaggtaaagatcaaactgtcaaactggtagtccttaagactctgcttccatgggtatgacttgttctaggtattattgcctaacagaaatttccattatctaattttaaattgtgtaaggtttcacagtgagattattcgaagcatttagaggtatttactaacctgtgatggcttacaaatctcttcttgttgcaataggtgtgtttgtagttgctgctaagcgaacgccctttggagcttacggaggccttctgaaagacttcactgctactgacttgtctgaatttgctgccaaggctgccttgtctgctggcaaagtctcacctgaaacagttgacagtgtgattatgggcaatgtcctgcaggttagtagagtaaaggaaggtgttcactcctattgcttctttgatcagtttctaaaaataattcctttaacatatcataatggtaaacaagttaataatagttatagactttttttttttttttttgagatggagtctcgctctgccgccaggctggagtatggtggtgcgatcttggctcgctgcaacttccgcctcccgggttcaagcaattctcctgcctcagcctcccgagtagctgggattacaggcgtgtgccaccaagcccagctaatttttgtgtttttaatagagacagggttttaccacaktggccaggatggtctcgatctcttgacctcgtgattctcctgtctcggccccccaaagtgctgggatgacaggcgtgagccaccactcccagccaatagttacagactttatacgtttgtaatttgagtaattctgtgactccagaatcaacagcatgcataattcaaagcatcatatgttctagaaactgtatgtctgacttgggatgcatttcagtgcttcctaaatagcagattgacttccttggcttacttgaagttaattgatcttctctatatgccaccttagtaaacccaagccattacagcacacctcccctaattttcttacacattgtaggagcttgatcagtgtttgttgtaagaaataagatgcttccttaccctctgtcttgctatgtgtgatgtacaaaatcaatcattcatatgcaggtaattgaaaattcagaattcctttaaagtatacamacatttgttggatacctagttagaggctattataggtgctatggcacccaggtggaccaaaaggaggtaataatctaatgaaaaagataagagatatatatatatatatatatatatgatcagtttctgtgatatatcttatgtatcatatatacacacacaaatatatatatgatacatatatttaaagatgtcaatgatgtgatcattgctaaaggaaagagaatgacaatggacacagaartcactaggccttgcatttgaacttgatgctgttcatcttgccgttgtgtatcttcacatccagaaaaagcagtgacttttttcctttggcagttatgtctgttgaacctaaaatattttcataaagaattctcaatattgtcttttgttctttttattttattttgtaacttttacctctgacctaagaaggcattagaacagattgaatagaaattggatacttccgttttttgcgttttctagaattttgaaggaaaaatatttttttcccagcatgtattctctcaaactttataacacaaagtcactataaatagtatcagtttcattgtgtttgtgcctctgttcctaaagacagtttttcttgtgttaagttttctgtcaggccaagatagagttttcttgtaaggatgttaagtgcttaacataaatatttggggttaggcctttatggttaagagagaacagaatatgcttcgaataacatttgacaaataccacaaagctgcttttctaattgagttttatattattaaatatcacttggaataaatgagttttacttatttcataggaaacaatgaaatccaatgtggattctttttatttctttttcttccctaattgccctggctagaatctccaatgttgaatagaagttataagaaatggatatctttgtcttattcctgattatagggggaaagcatctggcctttcaactttacatatratgatagctgtggatttttttttttttttttttattgatcattcttgggtgtttctcgcagagggggatttggcagggccacaggacaatagtggagggaaggtcagcagacaaacaagtgaacaaaggtctctggttttcctaggcagaggaccctgcggccttctgcagtgtttgtgtccctgggtacttgagattagggagtggtgatgactcttaacaagcatgctgcctttcaagcatctgtttaacaaagcacatcttgcaccgcccttaatccatttaaccttgagtggacacagcacatgtttcagagagcacggggttgggggtaaggtcacagatcaacaggatcccaaggcagaagaatttttcttagtacaaaacaaaatgaaaagtctcccatgtctacttctttccacacagacacggcaaccatccgatttctcaatcccttccccacctttcccccctttctactccacaaaaccgccacggtcatcatggcccgttctccatgagctgctgggcacacctcccagacggggtggtggccgggcagaggggctcctcacttcccagtaggggcagccgggcagaggcgcccctcacctcccggacggggcggctggccgggcggggggctgacccccccacctccctccctcccggacggggcggctggccgggcggggggctgacccccccacctcccggacggggcggctggccgggcggggggctgaccccccacctccctcccagacggggtggctggccggccggggctgacccccacctccctcccggacggggcggctggcctggtgggggctgacccccacctccctcccggatggcgtggttgccgggcggagacgctcctcacttcccagacagggtggctgccaggcggaggggctcctcacttctcagatggggtggctgccgggcggaggggctcctcacttagacggggcggttgccgggcagagggtctcctcacttctcagatggggcagccgggcagagacgctcctcacctcccagatggggtcgcggccgggcagaggcgctccccacatcccagatgatgggcggccgggcagagacgctcctcacctcctagacgggatggcggctgggaagaggcgcccctcacttcctagatgggatggcggccaggcagagacgctcctcactttccagactgggcagccaggcagaggggctccccacatcccagacgatgggtggccaggcagagacgctcctcacttcccagacggggtggcagccgggcagaggctgcaatctcggcactttgggaggccaaggcaggcggctgggaggtggaggttgtagcgagcagagatcacgccactgcactccagcctgggcactattgagcactgagtgaacaagactccgtccgcaatcccagcaccccgggaggccgaggctggcggatcactcgcggttaggagctggagaccagccaggccaacacagcgaaaccccgtctccaccaaaaaaataygaaaaccagtcaggcgtggcggcgcgtgcctgcaatcgcaggcactcagcaggctgaggcaggagaatcaggcagggaggttgcmgtgagccgagatggcagcagtacagtccagcttcagctaggcatcagagggagaccgtggggagagggggargaggagggggagagggagagctgtggattttttatagattccctttgtcagattgagaaagttgccatctgttcctagtttgttcagtgtttttgtcatgaaagggtgttgtattttgtcaaatactttttctgttgactttttgtgttgaaatccacattggatttcattgtttcctaagaaataagtaaaactcatttattccaagtgatatttaataatattaaactcaattagaaaagcagctttgtggtatttgtcaaatgttattcgaagcatattctgttctytcttaaccataaaggcctaaccccaaatatttatctgttaataatttacacgagatgatcgtgtaaattttttttattctgttgatatgtgatatttgacaaaccttggcaaaagaatatccattggccaagaatttttttaatgacattaatttgtaaaataagataatttcatctcagtcaacagatgaaacatttagttagtagattaattgatgttatactgagttcctcccagttccatctgcattcaaaacccttaacttataaatgtgccgaatttgtcaagttttgaaaaacttgaaacctacacaaaagttaaaagaatagtacaatgaacatcctaaaaccccgtaccttgatagaccaatgttttacattttgtcaaacttgcttttgctcttgctaacagcctccaaaacaggctgttaatgtttttggttgttgttggttttttttttttaagtcattctttttattcaaagtgtggttcttggactagcaacatcagcttcaccagggaaatggttagaaatgcagaatctccggcagacctagacctgttgattcagaacttacattttattataacaagacgcccccatatgcattttaaagttttgggagtggtggtctactcctacctcttactctcctgaccaatcattcatctgtcttctccctaagtatgcagtcctcagcctgttttacattagaattacttgggatgctttttaaaagtgactactgatgcccaggccccacctccagcctttctggtttaattgatttgcttaggaacttaagcatgagtatgttaataaagcttcctaggttattccagcctgcaaccaaggttgagaaccacagcctccgatacttcctctgttaaggagcatactactttaggatagcgtattccatttttaaataactctaattgttataaatttctgtcttatattaaggacttaatgggatttctctaagtagcaattatctttaatatatttgaaaaccaattgactrtggttacacaacattatgaatgtatttaaataataccattgaactatacacttaaaaatggttacaatgatacattttgttatgtgtattttgccccaataaaaaaatagaaaaaaacccaattgactgtagtttttattcaaattgtaaacacatattagatataatatgctgtacttagatgcattttgtcctaccttagagccatatagtttatcatttttgatagattgccaacatttccatgtatttcgtgcttgttcttaattagtagatttatagagaaaattatttttcttttccttctctcttctagagttcttcagatgctatatatttggcaaggcatgttggtttgcgtgtgggaatcccaaaggagaccccagctctcacgattaataggctctgtggttctggttttcagtccattgtgaatggatgtcaggtatggacaacatttttttaaattctctgaaaatatgttaatagttactagaagaaatgtcccactgcaatataacactttagctttagggaggattgcttgagccctggaggtcaagtaaaccatgatcataccactgcactccagccatgggcaacagagtgagaccttggctccaaaaaaaagaaaaaaaaaaaaaagctaataatgaacctgaaagtggaataagcctgtcataaaaggacaaatactgtatgtttctacttctttgagatacctagcgtagtcaaattcatagagacagaaagtagaatggtgttcccagggactggtgagggaaagttagtgtttaatggatatggagtttcagttttgcaagatgaaaagcrttctggagatgggtgatggtaatggttgcatcacactatgaatacacttaaactactgagctgtatacttaaaaatggttaaaatggtaagtattatatatatatatatacttcaatatttttaaaagctagtatgttcatcattctttcgagtgctycctacatgctaggcaccctgctagatttacattcaatatctcatttaatcttacaaccatcctatgaagcaagaactattattattattcccattttacaggcaaggaaactgattaaagccattaaggttactcagtcatagaatttgaacccaggtctgtgagtgttacctgtgaggcactgaataaagaccgtgaggcaagcaggaaatctcaagaatttaggagaggataaggaaatgtattttatttcaaaggaagtgaatgatgctgttagtagaagtacaaactagtttgacctttttaaaggacagttggttaaatacatttgtttctttgagcacagagaagaaagtgaaatccaatttcatttgtaaaagtcttcattttattacaaacaaaataagagccagaggcgtattttaataaaacaattttcacattaatttgtttctataacgatatatcttaaatagtgacctcggttttcctagtaataattttaagaaccatcaggttcatagaggctcattatttgctccttttctgagaaaggcaaacagtggaaagtgttggaagaatgaagtggtttcctttttatgagtcacctagattgaactagttcttgtaaatctctgttcttgttcagatacatccattaatgggataaatttttcttttgcctttttaaagggtatgtcctttattatctgctgtacatttatgccaggtattaatatctgttgattttcaagatttatattstgttaagaattactattcttagccacatgyaggtagggcctgttactcaggcaaacatgattgaaaccttttagttttctcctcctacatcttggtaatggatactttagcatttgctttacagttactttaaaagcatttccttttgagacactgtaagctacagtacaatatttgtttgatttaccattaatttgtaaaatcagtgtgtttcttaatacattgtttgggtacggtaaaaggagtttttattactgtttgtttttaaataggaaatttgtgttaaagaagctgargttgttttatgtggaggaaccgaaagcatgagccaagctccctactgtgtcagaaatgtgcgttttggaaccaagcttggatcagatatcaaggttggaaccataaaaatttaaaagaattagttcttattagcattatataagtacttttaataacatacctttttatgggagagaaaactaattttgaagccaatttcgttgatgaggattggcaagatatgaatgattagaagtttgtaaactatttcaaaactctattttggtggttagttttgacattttaacccatatgaaattagattctatctatctcagcagacctctagtagtataattatcctgtgtaagtggccataggcatgggagagatggaggaagggaagaagtgrattaaaaagatagacaaaagagtgaattaatctcactactaaacaattagtaatctgagtaattaaatctttaacgtgacttatagaagttttatttctgggacagtctcagaatagatttcttcatcatcacagaaaacatctttgaatacagattatattgtcccaaatcaaacaaaaactgattcttttatctttgagagctacaacttgagaatgatggtacagtactgataaagaatgatgttttcttctcattcccatgtgaaagggctactgacattttatattttttagcattttctatagtaatgtttgactcacactgttcacccagtttctcacctggcctttttggaagttgaaaggaatgggacttaagagaatctatgcggattttagccaccaaacacatttgagatatcttttatgaagacaggtcagtgagttaaatgttgatgaggcagcaaagtggggcacacttaccagagactaactacttgaataataattaacaacctttctgtaactctgggaacctgtcccaagatcttttcagcctcatagtaaccgatagaaccagctattcctgtcactgaggcgcaggatgaaaaagaaaaacagataatactgtttattacagagctcagggctggtttacaaagatggctataagaaaacattgcatgaagactcattgtcaggttttctacaaaatatgaccttgaggatttaatttttgatcgtagggtaacttctgtgatctcaccatgcacgtctagtcctgttagctgttcttagacccccacatttagagagggacagagaatgtgtgcattttattttgtgacattgaatgttttcaaaaacattgcatgtttttaaaaaatatcccataactgaatatgaatagtggttatcagaaagtcttaattttacttttgtttattggaagtgttgattatttaaagaaattataacatattacttttaaaaggaaatgccttaacaagtcactttattaatgtcttttaatagctggaagattctttatgggtatcattaacagatcagcatgtccagctccccatggcaatgactgcagagaatcttgctgtaaaacacaaaataagcagagaagaatgtgacaaatatgccctgcagtcacagcagagatggaaagctggtgagtgaaactggaaagtatcagtatctatagaataaatatctataggaaatattttcatcatttctattatggttatataatatttwcaaatcatacctttaagaattattacatcttttcattattcctttgtctttagatgatcagatattttattaattattgcaaaattaactaggaatttctcttttgaaaaagttagtactacttaaaaagtggtattgctacttgaccctagatggacccttgagttttgtgctgaactggtcctgttgtcagtagaacatgatgaggaatacgatacgttctgtcagaggtgatagctcactgtggcaactggaatatagaggatgtcctctcccacaagccatatcataatcataagaaggggtaatgtatttggaaaagacccactgggtcttttatgctttccttctgccactcctaattaagaatcattgtacctaactcagagacttagaactagtccgagactctagttagagtgccctggtgtagcacagcaggttgctatagagccggtccmaaacaggcaaatgtgacagcagttcttttagcagtgcagcaagttgaagaaatgtgatatttaaaaaattaaactgttaaagcaagtggaaactcttatttaggaatattaaatgcttgaagtaatgaggataaagtccatcttagcatttcagaaggataagtggaatagagctgatgccatctaactcgtgtgtttttttacttatatgttcatagtggaagaggattggtctagaagtcaagagttatcagttctgtttctacttctaccacgcacaagttatcaagctcagtcatatcatttattcactgaacctctgtaagatagagataacaatatttgccttccctatttatctaataaggttgttttaaaaccaaataagggcatataaggaaagtattttgccaattgtaaagtgatatgaaaattaaggttagtattattcctgaccctatttccaaagctatagattactacagtacattctagtcagtggaggtcaaagtaggtaagatgttttacttataattgtattagtgattgctcccataatttcttcaggttgcctatcactattaagtttcagttagattactttgtggcatagacaacttggtaactttttaattgcttatctcaccaaaagaagtttaaaaggggtattaagtccatttattgccattacatctatagcaaacagacagatgctgctaacagtcttagcagtacctggtgaaaaaaaattgtggttaaaaaaatataatttttaaaaatataatttttaaaagatgcaaaatgcatctacataaacacatgacagtatcgtaaatcctccaatacggaaggtaagttgtgtaagtaaatagtaaagactctataatttttaaaagatgcaaaatgcaactacataaacacatgatggtatcgtaaatcctccaatacggaaggtamgttgtgtaagtaaatagtaaagactcaggctgagcgtggtggctcatatctgtaatcccagcactttgggaggtcaaggagggtggatcacgaggtggtgagttcgaggctagcatggccaacatggagaaaccccatctctactaaaaatataaaaaaaattagccgggcatggtggtgggcacctataatcccagctactggggaggctgaggcaggagaatcacttgaacccgggaggcagaggttgcagtgagccgagactgtgccgttgcactccagcccaggcgacaatgtgagactccatctcaaaaattaataaagactcaatattaaagtagactgtgaggaaaaggtagatcagaaattaaattgaataatatgtttgatttattttcatgtttctctcttttattcttatgatagtctctctactatttttcagctaatgatgctggctactttaatgatgaaatggcaccaattgaagtgaagacaaagaaaggaaaacagacaatgcaggtagacgagcatgctcggccccaaaccaccctggaacagttacagaaacttcctccagtattcaagaaagatggaactgttactgcagggaatgcatcggttggtatcaycacacagwttagcttgaattcttcctggtgtgttcaacaaaagtaatcatgaagtatcttgtaaatactttttatgccagtctttagttgtttagcttaaactaatagtgttcatattcaattaatttaggttttcatagacccacacaaaatcttttcatatttatttatataatactcttctgatttcttaattttttcagaactaagaaatttcagaaacaaatctatctggcttattttggttttcaaacttttttttttctcatgcatacagtttatcgtatttcttcttacatctactcacatctagataaaagtttttccttgacacccttttccttgttctttagtaaagttgtattctgtgccttaaaaaatctccttcatccaccacagtaccacttttctaattgtatctcacactgtgcmctggcttcctatgtactgccatattcctaatactactagtccattagttcaaactttgattaactggattattttagcctttagttaatctagtatttttattttcaagggtgtagctgatggtgctggagctgttatcatagctagtgaagatgctgttaagaaacataacttcacaccactggcaagaattgtgggctactttgtatctggatgtgatccctctatcatgggtattggtaagtttatagtaaaacaaactggttctataatatttctggaggtaagtcttctttggcattcagagtcctraaaaagtggccaaaccaaggtcacctgtagagaaaagaagattggtaatcagtttaaataaaaaatctttatgaagaactgtcctagacacaatagaaaaaccaagaccgtgtaaactccatggaggaagtaatcatatcttagtgtccatttgagatttaaaaaatcaacacacagtaattatatcttattgttcctttgagagtttagaaatcaacacagaaaataacagaagaattacgtgatcctgacaagataaaagaaattatgagatgggagaaatcctggggtgaaacagagaaggctgtatggagaaggtggtatcgcagctccttgctggttgttttacacacattcagtcttcccacgtctccagtaagggagacttctttgtgaatgagaaaattgaggcttagggaggttgtcttacaaggttccaaatcagtaagtgacagccagggtgtgaatccaagtctctctgaaatcaagtgctctcttcactgtgagttaaacgcatagtctcaggaagtcaaattaatattcctcttgctcaggtgagtattagcaaaataaagacttataattagattggtaaaatgctagmtggaaaaaatttggaagtccataaacatgtatagtcttggcttaaaatatttgatttagaagtagaacaaagagctttttgctggatgcactcctaggaaccacacacgatgctgaattttaatagttcctgtcattctctgggggaacagggaaccaattaggtgcctyacttagaaaaataaaatttggtgctcagtaactttgatatatcccacctacatataacctcccactgtaaggaaaagcctgccctagggtatagatttcagattgtttagcccttttttgaataactaaattgttttctgaggtgggttccaagagaggaggaggaggataacctgttactgacctgccatctcagagatccttcagtgtaagcctacaggttctactcaaacaataccacttacactgacttgggattaatactcaaccatatttgctgccatgtccctcagagaagacatatctctgtatagagttcctaagaaaaaaagctggcatgttcatattttgtcatctttcactatgtgtctcaaatttatgtcagcaagaactgcaagatattttgacacatatgaaaagtcaatcttaagcttattagcttttggctatccactattggcaaaagataacttttgtcttagaaatggaaggtggtggaaaaattaaacatccgtatgttgttatggcatttattattttgatatctagggtagtggttcccaacctcagatgattgtcagaatccactcataacccccacacccttagattttgtttcagtaagtccagagtggagcccaagagcagagttggttttgttttttgtttttgacacagagtctcgctttgtcacccaggctggagtgcagtggcgtgatctcagctcactgcaacctcattcttcccagtagctgggattacaggtgcccgcccccacgcctggctaatttttgtatttttagcagagacagggtttttccacgttggccaggctgatctcaaactactgacctcaggtgatccgcccacctcagcctcccaaagtgctaggattacaggcgtgagccaccatgcccagcccaagagcagagttggtttttttcctgcatacacctagatgcttttgatgatcaaacaaatgtatgtgacatgggttggctattttatactcctttttcagtttaactttatttaataggttctggtagattagcatagccagtgaaccaagaaagcgttgttttccttccttctgttcctgggcctgaatatttgccctaaagtacaaagaatgctcctgtggtaggattgtcatttttcctcggggcttgaacagagctgtacattccagatgtcccacagtatcagctgcccccttcatctagaagtttggctgtcacttgtatatagtgatgggattaaacaaagtaactcgttgaagcatcccagatgaataagtggggagaataagttawtaagtatctagtgggaactggtttgttaatctaacttacaagaatagtggttctcagttcyatgattacctaatgactagcaatccttagccctgcagaatagctgcagaccaaaaaaaaasggggaaagccatgacttgaaaagaatagtactggttctgaggaaatacacagctatagaaagacagcactccctggaactcctcaggggtggcaatggtagaggttggtgggtggaactttgagcctcttcagctggagcagtctggcattatctattacttggcatcatatgcaaaaagaattctgatgcttaaagagaaaaaggtggaaaacccattcagagtgctattgatgagtagcttgttgcccagagagatgcacaaagtcgcacagctattagtgacaggaaccaggactagaaataaggtctccttttcctaacaagaatactaaaccttcctgaagtcccagtaaataacagtggtctgggaagagtcctttaaaaatcgagttatggcctagcatattgttacggtggattctgagttaaagtgaaagtacgagtcatgcttgctgtgttgtttatgcagacaaggaagtgtgtacagtggtctgaacattgtccaccttttatgtgtctgtcaccactgttggctacttcatcccctcaccaggctggataactgatgctttactactgactacccatctcattttcatgatttcatgctttagacatacaaagagaatctggaatcagatcctgtagtaaatcagtagctgtagtaaatcagtagccacatgaaactggcattttaaattgaagtgcattaactggatagtcctaatcaataagcacgtggtttgttgtccaaagagtattttaactacgtgacaaaataaatattayatttaggtttcattatgcctttcttgtaaagactgattttccattttataaggtaaaatgcttgtgaaacttgatgcagaatatttgactacttgaattcagcagaacatactacatatttttctttgtagacatttttggcagtttcattctttaagarcaagtcgagaagtagataatcttctctacccaaattttttaccttttgagaaaaaatatggatttaaattatgagcaatattaaactctcattacatcatcagaaatctgggagctaaagtttatttcagaagtcttattagatggagttgcatttcttaaattaggagttatgttttatttaaatttcctgcctacccttggagttgtaaacatcaccttacttcataaaaccttccctgaagtgcctcgtagtttcccatctctctgtgcccatgtggagatactgctatttcttgtcttttatccaaatgggcctgaaaattcagagtgtagccacagtaacttctgtgctgtgaatgcatatggcttggatcccaagtagagcactcagtctgccttgctctttgatatcaattataatctattaacataactaaaatcccatatatggactcctttggctgttttcaatcttaaagccgtttatggtagaacttttcatgtaattctcttatctgcagtttgaatgtataaacaacttttcaccttggttccattttatttttattattattttttttcttttttagagatggggtcttgctgtgttgcccaggaggctaaagtgatcctcccacttcagcctcccaaagtactgagattacaggcatgagccaccatgcctgggccctttttctgcctctttatggtcacttcatttaataggtacggtcaaggtagtaagatttgtggctactaataactgccgcattatttcttccttacttggaaagaaggagaagcttgatacgtaaatataagatgacatttatttctatatttttatagaagatttttattattatataggtcctgtccctgctatcagtggggcactgaagaaagcaggactgagtcttaaggacatggatttggtagaggtaagtgttttttttttktttttttttttaacaacatgaataaaccatgtacttttatagcataaatgactttaatttggtctcattgctctttgaatttcattgtagttagcctttccaaatgatgtacatctaaayaaatagtaccttcattagatgccttgtgwtgatacttttccccacctggttaacatgctttatttatatttgaatattcaaactgcctgatttctcttactcaagtataaattcctgggaatttcttactactttataaaactgttacattttagactattaacatgcctgttgaatattaaagtgaaaaaatatatgtaaaataattgacataatagaaaagcaatatttagtgccaaatctacaagtttcttgcccttctcgccagatagagccccctcccttaaatgtatctttggcttttatacgatagttgtagcttgatttgggatgcacctatcataatttttgacactggaacttaaatttattgagtgatttctttttaaatgttagtattagaactaaagtgtcttaagcataattaaaagaagaggtggagaaacatttaaagatggttatatacattccacacttttggaatatttatttgaaaattttaggtgattaagcatgtgatgcctggcaytgggaaataactaatagaacaaaggaaatctatttaacttgatagcgaaggggtaggcacaggtgtgatttcctctatgataatctctcacacaggaaaccatgatttcagacaaatggtttatctttaaatctcttccacttttagcagatcacagttcagagcctcaaagaggctgtttaatttattatatttgtgtcagcaaataggtaccactaaatttctcactttagacctcacatttaaaactattaaactatatcaactttgggaagttgttcataatcatttggaaatgtatacattctcaaggacataactcagaccatagttttcctaggttcaaaagcctagtttcactacctattctaggtctcttagtacctccttgaagatggctctgtatatagagtagaaagataatggtggatctaagcacatatgaggcaccatcttgagagaccacaaagtatagtaggaaagagcacaagactgaattttatcccaactctgcaaaagttacctttcttagaatgagtttccttatctataaaattcctgaattaagatcatatgataatacagtactgtaaacttgaagtaaggtaattgccagtttgtgtaagtataacataatatacttttcagttctgccacatttcaacatagtaactgttccctttatgtacgtggctttgaaggtttattctttgttgtgtgtcagcttcttggaaggatagctcctagtactgcataataataataatacttgcaaccacttattgagtacttgccatgtttcaggtaacacactggacacttaatactcatgattttatctaactgtgacagtgactcttagcatgataccacagtcacattttcacacgcggaaacgtgaatttaaagagtttaaagaatatgcataaggtcacaccctaacaaatggtatagccaatatttgaaccatccatccagttctaaaacctgtgggctttctacagtatcccactgtgtctggtatgtgtcaatttatgggattactgagaattgcctctaagggatgcatttgactaaaagtattatttagtaaatatacacattttaaacctgatagctttatgcagaatgattgtagataaaataactttgcgaggtaatttaaataggaagaaacagcagacttagctgttgataggactggaccattctcatttaaaaattagtttgtgagtaaggatttttgttagtgctctaatttttgttttaaggtgaatgaagcttttgctccccagtacttggctgttgagaggagtttggatcttgacataagtaaaaccaatgtgaatggaggagccattgctttgggtcacccactgggaggatctggatcaagaattactgcacacctggttcacgaattaaggtatttgctagaaatagctgcatttcagatttgctgttttttatagaaatgcayggatttaggcttccccagaacactccaacatttttcattcttcttcatgtctcctgcactggctgttaccaggaacaagttacttgggcagtgcttttcatctggtctcatagatgagtcagtcaccttgttagtggctttgcacttaagaaccaagctcttcctctgtgtgtccagtctctgtgcactgtgtgccccactcagcttgtgttcactgcatgagcagataatgaggccctgcttctcatggcacttgtattttagtgccagttacaggagtaaaataaatctattttagaaaaaaaaagtactgagtgagtactgatctagatgccataatttatgaaatctaagcaaactgacatttgggtctaagtttttcttttcactgcttgcagggttccaggaggaaccttttgggtgtttggtgcttttcagttttgatagatagtaccagaaggaggagctcttctatttttggaatattttgctctgtagaaaaattgcaaacaaaaccaagtaagtcaggctgaaaaattactctgactccctgttaggccaggggaaatgtgactcttatttcacttaatgattcmctgagttgaaataggtgattgccacatacaaaagtaattcctggataattttctcgaagtcatcatattaggagtgaggagtactttaaaagagtctaatttttatgaaagggacatggatagtttctaaattatctgccctttcatagggacaaactttattaattacatttcttctaaggtgccatgaggctctcacactatataaatcaaatatataaatcaaaggagcttaatgttcatccccttccccagcttcccatttatccagttacctcctcttctcactcctttcccgtaacacacacaagcttctgtatgtgtttcatataccctaaatctactctataaccctaaatccactcatctcctttttagtttgcctccctcttctggtgtttgtttttgttytttgttttttgttttttttgattaaaaactttcagctttccaaagtctgttgcctgttgtaattataccaaaattgaggactggggaaaagattgagcagatgagctgaataaggatgagtaatgcagatgtgatgttattagttctatttcattaatctgattttttattagagtagatttcagtcactgctttctttttcaggcgtcgaggtggaaaatatgccgttggatcagcttgcattggaggtggccaaggtattgctgtcatcattcagagcacagcctgaagagaccagtgagctcactgtgacccatccttactctacttggccaggccacagtaaaacaagtgaccttcagagcagctgccacaactggccatgycctgccattgaaacagtgattaagtttgatcaagccatggtgayacaaaaatgcattgatcatgaataggagcccatgctagaagtacattctctcagatttgaaccagtgaaatatgatgtatttctgagctaaaactcaactatagaagacatyaaaagaaatcgtattcttgccaagtaaccaccacttctgccttagataatatgattataaggaaatcaaataaatgttgccttaacttcagttaatattttcctgtcatttatatttttaaaaattttaaattgtgataagatacacattacataaactttaccatcttaacccttttttagcgtacaattcactggtattaagtacattcacatttttatacaaacatccccactttttatcaacagaactttttcagtcaccacacatggaaacaataactcctgattctcccatcccccatcccctgacaaccaccagtgtattttgtttctataaatttgatgactcgaggtacctcataagtgaaattataaatatctgtcctttcgtgactggcttattttactttactttatataatgttctcaagattcatccaccttatggtgtagcatgtgtcagaatttccttctttttaaaggctgaataatattctgctgtgtgtataaaccttacttccttcttcccagcttaaaggccatctttcatcctttattttctccctttaaaatgcccccacaacacttccattgctttatttgtctgttctaagactggatatctagtagggcaaggccctattcttgttaacttcatcaaagagccactggaaattttaattaagattaaattgaatttatgggttatacatttattggggggaaatttttttttttttttttgagacagagtctcgctctgtcctccaggctggagtgcagtggcgcgatctcagcttactgcaagctccgcctcctgggttcatgccattctcctgcctcagcctccccagtagctgggactacaggcgcctgccactacgcccggctaattttttgtatttttagtagagatggggtttcaccgtgttagccaggatggtctcgatctcctgacctcgtgatccacccgcctcggcctcccaaagaagtgctgggattacaggcgtgagccactgcacccggccttttttttttttttttgagatagcatcttgctctgtcacccaggcagaattgcagtggcacagtcatggctcactgaataatagatgttaaataatactagatgttaaataatagtatcataagtacctacactgtttcctcaaccctttgcttatatggtttccttcatttgattaaaaagctgaagtggcacatacatccccctttctgtcatagagaggcagatgacaagcggcctacccacggtttgggataatggactagtggcaacaggcaagtccagcttttattgtttgggatccttactgagaagcagcaggcttcctctactgtcataaaaatattaaaaagtaagagccctgtataatttctcataataaaacaatgttttgcagaacattttgttttttacatattcttcgtttgttgtaacttataataaactttctctgggatgaaatgaccaaggccacatgttaccatcttctagaaacactagtgatagtttatcaagcctatgaatttccagatgaagaaggaattgtcgccaatagctgaagcaatccgcttcccagggcatctcctggcacaggccttggtaaaggtttatcgcttttccccataaaggtcttgtgtagttttgttatccaactgagacctttttcctattttcttttacatttgattattgctaatgaatagcttttggatattatatatctagccagcttgtggaacccttttattaatttgaatcatgcagatagtatctcatttatttttattgcctttttgccttgtgctgagaccactggcgcagtactggaggaaataaaatgtggtaatgctcatattcgttcctcactaagttgatgcttacagtaggtttctgatagataatgctttatcaaggtcaggaagtttccttctattcttagttttcttaaggactttatgagtggttcattcattcttcactctaatcttacttggctgccaccacttaagccacagttctcttgctcatgccaccctttatgttcatattgccagaactagtggagatctttctgtcttcaccttatttgacttctccaaaacatgacccagttgaccactcctccttgaactgacttctgttcatgtctctgcttttccactgcctctcaggccattctttttcatcttcttgggcagctgctccactgctgtgagtttcttgggattggtttttggatttgtggcgatttctttctatgattctaaataccattacatttggctgggtgcagtggctcatgcctgtaatcccagcactttggaggccaaggccagaggatcacatgagcccacgacttcaagaccagtctgggcaacatagtgagaccacatctgtacaaaacaaaaaaccagaaaaatgagctgggtgtgatggcatgtgcctgtagtgccagctgctcaggaggctgaggtgggaggattgtttgagcccaggaggttgaggctgcagtgagccgtgattgggccactgcactgaagcttggatgacagagtgagaccctgtttcaaagtacatacatatatacatacataatatatcatcacatttacatcccagcactggtctctacctccagactcctgtagcaaactcccgtcttgacttttctcacagatgtcttcttaaacatgccctgagcagtaacttttatcatatcccacttaaccagctccctcttcaagttcttctcagtgccagtagctcaagtcagaaatccaggcatttccctcagttctaccctctccctcactcttcatctccagtctatcagcaagtattatcagttcttccaagatatagctcaaatacatccatttcttcccctctccacctccactactgtggtcctaagccaccagaatctcttgcctggacaaccacaagagcttttagaggctcctacctccattcttacccctcttcagtcattctctaagaagccaccaggagcatcttttaaaaactcaaactatggtgactctaacgtgatctcaggccactcctctagctcccagtgcttcagacaaatggcctttctggggacggcttgcacaccatgctctttcatgccatagggctttggcagatgttctttcctgtgccttcctgggcctgggtcccgctcaccaagtctcagatgcttcctcttcagtcaggttctctgttctgttcaccctaagttcctcgccctgagactttccactgtagcaccctgacctttatggaactttcctgaattcatattcacttagtagtccatttactgtctcactccctcattagactgtaaactccataaaggcaaagacttcatgtgtttagcacagcgcctggcacatggtagatgcacaataatgttgttgatggaatgagtgcttggatggatgggtgaatggatagatggacagatgatgtttgaagaaattatagcataaaaattgcttaatcttcaaaggattaagagatggatggggccgggcacagtggctcacacttgtaatcccaccactttgggaggctgaggcgggtggatcacctgatgtcaggagttcgagaccagcctgaccaacatgctgaaacgctgtctctactaaaaatacaaaattagctgggtgtggtggcacmtgcctgtaatcccagctactcagaaggctgaggcaggagaatcacttgaacccgggaggcagaggttacagtgagccgaggttgtgcctttgcactgcagcctgggcaacaagagcaaaactctgtctcaaaaaacaaaaacaaaaagatgatggataggaggcaggactagattacagctcccactcagacggatggagcagtatgtggaaactaacatcatgaacttttgctccaagaactggcaggaacataccaagaaagctgagacaatccacagacccctttgtgaaggaactggatcactgctgcaggctccctgagacaccaaaaaactgtgagtctgcttgctttctcgatgggaaggctcgtggtctggggcaagttctcagccctggtcttcggctgtctgaaaatagactcggtgctgttggcaaggcatggtgggagtgagaccagcctttaggactgtgggctatgtggaagcggggtgaagcctgtgactgccggcttcccaccacttccctgacaacctgtatgactcagcataggcagccataatccccctgggaacataactccattggcctgggaaccacactcccatcccttacagcagctgcagcaagccctgcccaaggagaatctgagttcagacatgtccaaccctgcccccacctggggtctttctctacttgccctggtacccgaagacagatgtcataatctcttgggagctctctggccctgcccactgcttgagaaacctgaaaaccgggtgtccccagggcaagtttgcatcctccctataatactgcagctgatatgctcttgaaagcaccacctcctggctagaggccaaccaacacaaaccagcacactaaacaaaaatacaaccaaggaccctcacagagcccacttcactcccctgctacctccaactggagcaagtgctgttatccacggctgaaagacctgaagacagatcacttccccggactctttgcagacattccccggtaccagcccagagcctggtagcttcactgggtggctagacccagaagagcaaaaacaatcactgcagttcggctctcaggaagccctattcctaggggaagggggagaacaccacatcaagtaagcaccctgtgggacaaaagaatctgaacagcagcccttgagtcctagatcttccctctgacatagtctacccaaatgagaaggaaacagaaaaacaattattgtaatatgatgaaacaagtttctttaacacccccaaaagatcacaccagctcaccagtagtggatccaaaccaagatgaaatctctgaattgcctgaaaaagaattcagaaggtcgattattaagctaatcagggagacaccagggaaaggtgaagtccaacttaaagaaatcaaaaacatgacacaggatatgaaaggaaaagtctttagtgaaatacatagcataaataaaaaacaataatgacttctggaaaccaaggacacacttagagaaatgcaaaatgcactggaaagtctcagcaatagaattgaacaagcagaagaaagaacttcagagctcaaagacaaggctttcaaattaacccaattcatcgaagacaaaaaataatttaaaaaatgaacaagctgccaagaagtttcggactatgttatatgtccaaacctaagaataattggtgttcctgaggaagaagagaaatctaaaagtttggaaaacatatttgagggaataatcgaggaaaacttccccagtcttgctagaaatctagacatccaaatacaagaatctcaaagaacacctgggaaattcatcacaaaaagatcatcacctaggcacatagtcatcaggttatctaaagtcaagacaaaggaaagaatcttaaaagctgtgaggcaaaagcatcaggtaacccacaaaggaaaacctatcagattaacagcagatttctcagcagaaaccccacaagctagaagggattgggggggtcctatttttagcctccttaaacaaaacaattatcagccaagaatttttaatccagcaaaactaagcttcataaatgaaggaagattcagtcttttccagacacatgctgagaatttgccactacaaagccggcactacaagaagtgcaaaaaggagctctaaaccttgaaacaaatcctcaaaatgcaccaaaataaaacctccttaaagcataaatctcacaggacctaaaatacaataacacaatgaaaaaaaacacacaggtattcaggcaacaaatagcacaattaatagaatagtacttcacatctctacactaacgttgactgttaatggcctaaatgctccacttaaaagatacagaatggcagaatggataagaattcaccaaccaagtttctgctgtcttcaggagactaacataacacataaagactcacatgaacttaaggtaagggaaggaaaaagatattccatgcaaatggacaccaaaagcaagcaggagtagctattcttacataaaacaaaacaaactttagagcaaaagaagtttaaaaagacaaagaggggccgggtgcagtggctcatgcctgtaatcccagcactttgggaggcggaggcaggcagatcacaaggtcgagatcgagacaaccctggc

SEQ ID NO: 94311 - DNA, 13363 bp, Homo sapiens
ttaacttatgatgtctatattgctcaatagctggtggggatgcagaaataaagatctgttttctcactcccaacaggtggttatcaccaggctaaaactggacaaggatcggaaaaaaattcttgaacgcaaagccaagtctcgacaagttggaaaagagaaaggcaaatataaagaagaacttattgagaaaatgcaggaataaatagaacctgttgtgcaaccacggtttaaccggagattttgaggctagggtgtgtttctttcgaacttttcggaatgtctggaacatttcatttcctgttttgttacctgtgcctctgtaaatctacttttgcaattttaagtaataattttatgaataaaaatgggaaatgcttcctaattccacatagtatttgcattgttttataaataaattccacttactatcaattcccctttgccagtcttttcctatttaatgtgtggaacagcaaaatcgcaggggtagggttaaatggccctcctcttgcctggactcttgtgctgatgaagtagaaagggcagggctctagtcttatatagacaggcctcatcatcttgcccaggctggtcctgaactcctaggctcaaatgatcctcctgccttggcctctcaaagtgttgggtttacaggcgtgagctgccatgctctggtccttgacacagggatttgccccactcagtagcagtcgtaatgtgcactgtcacatctcacgcctgacagattgctctctggcctcctgacttgggcttccccagctttctctccaagtgccaactaaaccaaatcatgtgcagctccctgaccaggcttatcttcccaaagttttgactttgcaattgccattttcatgtgactaaaaagccccttttcctctggaactaacttgagaaactggcagcctacaggaaagatttaactgagatactgtttttcactatattttccaacatttaaaatgtgggagactccacagagaatcacctgcttcacctggctccacggggctctccctgttttgcagtgttaagtgcagccaagggcttggcggttccctatcccacctgctctgctcccatacgcttcttgcctggcctccattggcctccgcattagactcctggtctaactttcaagcaactaaatcttcaagatttagttcctttggccaggcacagtgactcatgcctgtaatctcagaactttgggatactcgtgggaggatggcttgaacccagaagtgtaagaccagcctggttactgagaccccaccactacaaaaaaaaaaaaaaattaatttttttaattagaaaaaaagatttaattcctttgagaggtatgtagtgaataaaaatttttagaaaatgtatctccagggccacatccaaaatcctctgtccctgtgggaaaaaaaaaaaaaactttttttgagatggagtctccatcttgcttaggctggagtgcggtggcgctatctcagctcactgcaacctccgcctcccgggttcaagtgaacctcctgcctcagcctctcaagtagctgggattacaggcctgcgccaccacggggtttccccatgttggccaggttggtcttgaactcctgacctcaagtgatccgcctgtctcagcctcccaaagtgctgcaattaacaggcatgagccactgcacctgtcctaaaaaaaaacacaaaaaaatttttttaaagagagggtcttgttctgtcacccaggttggagtgcagtggtgtgatctcagctcactgcagccttgacagcccaggctcaagtgatcctcccacctcagcctcccaagtagctgggattacaggcatgtgccaccacacccagctaatatttaaatttttttgtagagatgggagtctcagtatgttacccaggctggtctcaaattcctggcctcaagtgattctcctgccttggcctcccgaagtgctggaattagacatgagccaccatgactagcctaaaaaataataatgtattgattaaaatgtatcaaacagccttttatgactttctagtaatggtttatctgacacactggaatttcttaataaatgttaattgaatcagtgttgtttcccattttgactgatgaagaaaacaagcttaggttaactgtccaaatcacagcataagaaatgaagccaagatttgaacctgagcctgactgcatcaaaaggccattcacttcccacattagccacttatctttagtcttccttccttcactcttgtcagcctttcactggagtctgataagagactgcatatttatgtggaacagacaagaacctatgtgtttgcagccggtagtgctacttaggaaagcattatcaccaactgtccaggtctaatcctagctctgccactgggcagtcatcagcctttgagcaagttactcatctctggacttctaaacagatgataatacctgctctgccttcttatctcatcgaaaatgcaaagataaaatggcaagatcagatgggccgtttctgagtactctttgaaagctatgagtatacaaatgttaatttcactatcattgttcagtttacttatatgtccaattctgacattcactctgcactcaaagaggcagttatttttcagaaaagaaatcagtgagtttggcagggcgcagtggctcacacctgtaatcccagcactttgggaggccaaggtgggtggatcacctgaggtcagtagttcgagaccagcctggccaacatggtgaaaccccgtctctactgaaaatacaaaaattagctgggtatggtggcgcacgcctgaatcccagctacttaggaggctgaggcacgagaatcgcttgaacccgggaggcggaggttgcagtgagccaagattgcaccactgcactgtagcctgggagacagagcgagactgcatctcaaaaaaacaaaaaaaatcagtgagttcaaaaaccacaaaactcaagatgtgttctctgacttggcattgatacactgaactcactgatacaaggtagacagatactgtcctgtccctggagtcagacagatttgggttcaaatcctgctcttgttcttgggaggtcatttttctgattctctgtttttctatttatgtaaaaagctgccagacacagtggctcacgcttgtaatcccagcactttgggaggctgaggtggaaggatcgctggagcccaggagtttcagaccagcctgcgtaacatagtgagaccccatatcgacaaaataatttaaaaactagccaggtgtggtggcccatgcctgtagtcccagctacccaggaggctgaggtggggaggattgtttgaactcagaaggtcaagattgcagtgagccatgatgacattgcactctagcccgggcaacagagcggaaccctgcctcaaaaataacaaataaataaaagagtaggtgcccaccatacagcagctgtataatcattaacatgctgagctatgtatctaatgagtatagtgagtaggttaactagtaaattctgaaatttatattttctaatttgattcttgtctttgttctcaaccaatacatattttaggactctaagagttgcatgaaagtcagatttcatactaaactcacagctccttactctacagtctgtaacctggtctgagctccaggctccagccattactttcattagtaaatttaagttatgatatcatctaggaatcagacctggcttgttttcagcaacttattccaagaaaaatgaccaataagagctttgagagctgcaatccccctgtaggtatccaaatcataccacactgcttatactgagccaggttgataataataatgcatgatgaagagcaggaactaggcctcaagttgagttctaatcttagctctgtcatttcctagctgtgtgaccttgggcaaactgcttaacctctctgggcctcaggtttgtcatttataaaatggagataaaattagtacttacttcatagagttgtcagacttattacttgagatactgtgtgtaaagcacagagtgctcaggaagttttagctattgtcttaaaggagattggcaatggaattcgttcacaggaacatagagaaaagtttttctccagggaggtgagacaaatactgattcttgaaaaaagggaagggtttaagggcaacagtgatgtgtttgggctgctgcaggaaatgaggattggagaatgccagatgggtgggcctgcctatcaaagttcaggccatggggtattagcttgttttctggaatgaatgaattatacagttttctactgaccttttcatcacatttgcggatgtccattcccttgagtggttcccttctgctattctgggaagatgccaaacttttaaacttcagataactgcttttgaatgtctgctttcacattgcataggcatgagatgttcagccacataattttctttttttttcagacaaggttttgccgtgtcacctaggctggagagcagtggcatggtttcagctcactgcaacctctgcctcccaggctcaagcgatcctcccacctcagcctcccagaactgggactatacaggcacatgctaccactgccagctaatttttgtagtttttgtaaagacgagttttcgccatgttacccaggatggtcttcaactcctaggctcaagcaattcacttgcctcggcctcccaaagtgctcggattacaggcatgaaccaccgcacccagaagccacaggacttttgacgtgagttggatgagcaagtaattgaatcttccaggaaccagacagaacccaactaaccacgagtccagcattctctgctgctgctgcagactttgagcagttcctatctgatagtttaccagagtcttgttcattgtccttttaaactggtattttttaattagataagtagtgcttatatatggtacaaaattaaaaggtaaaacaaaaaagtagacggtgaaaagtatgtttctttgtcaccttgagtctcagtcactcggttctctccagaggcactgtttccagtttcttttgtagccttccaaaaacagtatttattatattcatattcaattgaatgtttattgaaagtttgatccatgagaaagtcctcatgagaaaagcaggccatccaaatttaaacagctatataaggttgatttattatctgaacaccataattacaaaaacatgcacagatatgagaatgttctttgaccatcagaaataactaaattggccgggtgcggcagctcacacctgtaatcccagcactttgggagaccgaggcagaaggatcatgagggcaggagatcaagaccatcctggctaacacggtgaaaccccatctccactaaaaaaaaaaaaaaaaatacaaaaaaattagtcgggcgtggtggcgggcgcctgtagtcccagctattcaggaggctgaggcaggagaatagcgtgaacccgggaagcggagcttgcagtgagccgagatcacaccactgcactccagcctgggtgacacagcgagactctgtctaaaaaaaaaaaagaggccaggcgcagtggctcacgcctgtaattccagcactctgggaggccgaggtgggcggatcacgaggtcaggagatcgagaccatcctggctaacacggtgaaaccccgtctctactaaaaatacaaaaaaaattagctggggatggtggtgggtgcctgtagtcccagctactcgggaggctgaggcaggagaatggcatgaacctgggaggcggagcttgcagtgagccaagagtgcacaactgcactccagcctgggcgacagagcgagactccgtctcaaaaaaaaaaaaaaaaaaaaccaaaaaaaaaaaaaaaacactaaatcaaccactttccaatttattcttggcaagggtggctagttctagaataggcttttaaaggtctcatcttatgcagcagatgatgtctgaatcttgtgaagttgtgtgtaatttaggattctctgtatgccgacttatttcttgaaatgggagaggctgtcagtcggcgccacatgtgggctggtggctctgtggcagtggtggcggctggactccggcaccatgagcggcttcagcactgaggagcgcgccacgcccttctccctgaagtaccgagtcttcctcaaaaatgagaaaggacaatatatgtctccatttcaagatattccaatttatgcagataaggatgtgttccacgtggtagttgaagtaccactgtggtctaatgcaaaaakggaggttgctacaaaggaccctttaaaccccattaaacaagatgtgaaaaaaagaaaacttcgctatgttgcgaatttgttcccgtataaaggatatgtctggaactatggtgccatccctcagacttgggaagacccagggcacaatgataaacatactggctgttgtggtgacaatgacccaattgatgtgtgtgaaattggaagcaaggtatgtgcaagagrtgaaataattggtgtgaaagttctaggcatattggctatgattgacgaaggggaaaccgactggaaagtcattgccattaatatggatgatcctgatgcaggcaattatacygatatcagtgatgtcaaacggctgaaacccggctacttagaggctactgtggactggtttagaaggtataaggttcctgatggaaaaccagaaaatgagtttgcttttaatgcagaatttgaagataaggactttgcaattgatattattaaaagcactcatgaccattggaaagcattagtgactaagaaaatgaatggaaaaggaatcagctgcatgaacaaaactgtgtctgagagcctgttcaagtgtgatcctgatgctgccagagccattgtggatgctttaccaccaccctgtgaatctgcctgcacagtaccaacagacgtggatacgtggttccatcaccagaagaactaatgggatttctctggaatacaagctgatattgctgcatcgtgttcatctggatgtattagatgtaaaatagtagcttttcaaagctttaaatgtgtagaactcatctaagtaaattctgctgtgaccaatcccatgtactcagaacrttacccatctaaagcatttttcatatctcaactaagataactttcagcacgtgcttaaatatcaaggcagttgtcatttggaagtcacttgtgaatagatgtgcaaggggagcacatattggatgtatatgttaccatatgttaggaaataaaattattttgcttaaaaaaaaagaaataggagaggcaacatggcttagtggaaagaacaggagctacaaagagccgtgttcagatccaagctctgtcactgaaaacagctatgctttggacaagttacaaattacaagttacaagccttttaggactgggtgcagtggctcacacctgtaatcccagcactttgggaggccgaggcaggtgaatcacctgatgtcaagagtttgagaccaacctggccaacatggtgaaaccctgtctctactaaaaatacaaaactagccagttgtggtggcgggcacctgtaatcccagttactcaggaggctgagacaggagaatcgcttgaacccaggaggtgaagcctgcagtgagccaagatcgcgccactgcactccaacctgggtgagacagagcaagactctgtctcaaaaaaaataaataaataaataaataaaccaaatctaagccttttaaaattatgtacaatagatttaaaaatacctatattcagtgtcgtgagcattaaatgagacagataattcaaagcacctagtccaatgtctggcaggtggcaatcactccagcaacggtggcagcagtagtactggtggccatacacagtgcacattccatatacactactgggctaaggagtaataaatcctgctagggttttcagctgccccagtaacttccaagcttccagagtagcttggaaaggggctttatgacaccatatcttcgtgactctgcatgcctgtttttacctacaggactgagtttaggaaagaagggctcctcagctcgttgcacaatagtgtttcagtcaactcttgtttccttgatgctgctggggggcctctgaggtttttcctctagtggtgcttctcaaactttttggtctcaagacctgtttacatatttaaaaactatggaggacccaagggacttacatttatataggttatagctattgatatttgtcatgttagaaattaaaacttcaaattttaacatattaattttattatattattattattattatttgagacaagatctcagtcttcacccaggctgtagtgcaatggtgcaattatagctcactgtaaccttgaacttgtgggttcaagcaatcctccctcttcagcctcctaagtagctaggactacaggagataacaccacatcaaaattgtttcttgtagagatggaggtctcactatgttgccgaggctgctctggaactcctggcctcaagtgatcctcctgctttagcctcccaaagcactgggattataggcgcgagtcactgcatctggccaacatatttattttaaattcatacaaaaagagcaacaagaaacccataacatgttaacataacatttatatgagaaatagctgttttttccaaaactaacaaaacatgtggttggaagagtaacattgtgttacattttgggagaacgccttgacctctggtttaatagaagacaaatgcattctcataatactactgcattcaatctgatgtgatatgttgttttagatgaactacaggaagaaaattcagccttacagagattcacagttagaaaagacctgctggggtggccaggcatggtggctcatgcctgtaatcccagcactttgggaagccaaggtgggtggatcacgaggttaggagtttgagaccagcctggccaagatggtaaaaccccacctccactacaaatacaaaaattagctgggagcagtggcagtcgcctgtaatcccagttacatgggaggctgaggcaggagaattgcttgaacccaggaaatggaggttgcaatgagccgagatcacgccactgcactctagcctgggtgacagagtaagactccatctgaaagaaagaaagaaagaaagaaagaaagaaagaaagaaagaaagaaagaaagaaagaaagaaagaaagaaaggaaagaaaggaaagaaaggaaagaaaagaaagaaaagaaagaaaagaaagaaaagaaagaaaagaaagaaaagaaagaaaagaaagaaagaaagaaaaagacctgcttggggagtctcagggactccccaagggtccttggaccacactgtccagagtctgatttgtttcctgaagactttagcaccttgagggcagacagtatctcttcatttgatgggtcactgaatggggacagttttcatttggtgtgtgataaaatgcttttgacagactggctgatagagggagctataggctaatgctagcccacatatataatactgagatactaacttttctcctttcacagatgaaaccaacagatttagacagaattggtgtctaaagagttacatccagccgggcgcggtggctcacgcctgtaatcccagcactttgggaggccgaggcgggcggatcacaaggtcaggaaatcgagaccatcctggctaacacggtgaaaccccgtctctactaaaaatacaaaaaattagccgggcgtggtggtggctgcctgtagtcccagctactcgggaggctgaggcaggagaatggcatgaacccgggaggcagaggttgcagtgagccgagatcacgccactgcactccagcctgggagacagagcgagactccatctcaaaaaacaacaacaacaacaacagagttacatccctggccgggtgcggtggctgacccctgtaatcccagcactttgggaagccgaggcaggtggatcacctgaggtcaggagttcgagaccagcctggccaacatggcaaaaccccatctctactaaaaaataaaaataaaaataaaaattagctgggcatgtagcacgtgcctgtaatcccagctactcagaaggctgaggcagaagaatcacttgaactcaggaggcggaggttgcagtgagctgggatcgtgccattgcactccagcttgggcaacaagagcaaaactctgtctcaaaaaaaaaggaaaaaaaaaaaaaagagttacatccttgtacttccagacattgcttctcaaagaggctgcccagaagataaagcaaaggttagacacaaaaagggatcaatttaagacaaaaatttccacttgtttaagaaatgggaaagaattcacaatagccaaaaagtgcaagcaacccaaatgtccatcgatggatgaatggataaacaaaacgtactgtatacacacatggaatattattcagcctttaaaaggaaggggacattctgacacttgcacaacatggatgagtcttgaggatattatgttaagtgaataagccagccacaaaaggacaaatgccgtatgattcctcttgaaggaatctagagtagtcaaactcacagagacagaaagtagaatggtgcttgccatgggctagggggtggaatatgggaggtggttgtttttttgtttgtttgttttttgagacagagtcttgctttatcaccaggctggagtgcagtggcgtgatcacagcttactgcagcctttacctcctgggctcaagcaatcctcccacctcaccctccgcagcagctggaactacaggcatgcaccatcatgcccagctaattttttgtttaaattttttgtagagatgggggtctcactactgcacctggccagaagtggttgttgaagggatatgaaaaagttctgggctgggtgcagtggctcacgcctgtaatcccagcactttgggatgccaaggcgggcaaatctcctgaggtcaggagtttgagaccagcctgggcaacatggtaaaaccccgtctccaactaaaaatacaaaaattagctgggtgtggtggtgcatgcttgtagtcccagctacttgggaggctgaggcaggagaatcgtttgaacccaggaggcgaaggttgcagtgagccaagaccacaccaacctggatgacagcgagaccctgtctctaaataaattaataaaaataaattaaaaggttaagatagtaacttttatgttacctgtattttaccatttttaaaaggaaagggcctgactgcggcagctcatacctgtaatcctagcattttgggaggccaaggcaggaggattccttgaggccggagttcgagaccagcctgggcaacatggtgaaaccccatctctacacacacatacacacacacacacacacacacatacacaagcacacacacgcacacacacaattaggccagcatagtggcatgcgcctgtagtcctagctactatggaggccgaggtgggaagatcccttgagcccaggagttcaaggcagtagtaagctatgattgtaccaccatatgccagcctgggtgacagagcacgactctgcctcaaaaaaaagaaagaaaggggctgggcatggtggctcactcctattatcccagcactttgggaggccgaggtgggcggatcacttgaggtcaggagtttgagaccagcctggccaacatggtgaaaccccatctctcctaaaaatacaaaaaaaaaaaaatagcctggtgtggtggagggcgctggtaaatcccagctactcaggaggctgcagcaggagaatcgcttgaaccagggaggtggaggttgcagcgagccattgtcatgctactgcactccagcctgggcaacagagtgagattccatcaaaaaaagaaaaaagaaagaaagaaagagagaggaaggaaggaaggaaggaaggaaggaaggaaggaaggaaggaaggagaaagtagaaatgaacttctttctctaattttgttctgacctcatcccttcttagctactcaattcagttgcacagttatttattgagcacattctatgtataaagtcctcccggaaacaaagatcagtgaaacagtgcctattctcaaggagttggccctctagtagagggttggtcaagatacatatacaacaaggccaaagagatgcgctaacaggatgaaatgggtcttggagaaggcggtgtttgggctagaacttaaggaccataggatttctgctggggctaagttttggggaagcattatgagcacaaaggagacaaactagttttctacattgctgatcaggttaaaggcttagaatcatgtccgaaaagttggtacagatgttgaagattattggtccagtttcccgtttaatacaggaatccattctacttgatgaaagaaatcaggagttaatgcaatgtggctactgcaaggaaaccatggtccctggtaaagcacattgcatttaaagacctgctttctatcttgctttcacctgtaagctttatcatcaagctcctcaacctctctgagaactggcttccttgtctattccaagcttggcgcatactataactaacatatgtgaaaattctcagcaagcgttctaagccctgtttatcagctcagcacggtggcttatgccagtaatcccggcactttgggaggctgaggtggaggatcccttcaggccaggagtttaagacccaccggggcaacatagcgaggctctgtctctacaaaacattttaaaaattagctggtgtggtggtgcacacctgtagtcccagctcctcaggaggctgaggcagaaggatggcttgagcccgggagttccaggcagcagtgagctatggagcaccactgcactccagcctgggtgacagagcaaggccctgtctcaaaaaacaaacaaacaaacaaaactgttttacctttctttttctttctttctttttttttttttttttgaggcagagtttcactctgtcgccaaggctggagtgcagtggtgcgatctcagctcattataacctctgcctcccagggattcaagcggttcttgttcctcagcctcctgagtggctgggactacaggtgcatacctggccaatttttgtatttttagtagagatgggatttcaccatgttgcccaggctagtcttgaactactgacctcaggtgatctgcccgcctcggcctcccaaagtgctg

SEQ ID NO: 94312 - DNA, 13382 bp, Homo sapiens
tctaacaactgaataccctgaaaataattctatagttattcataaaaggactctaaaatatggaaagcagctaggctgttcatggcctatgaaccaagggcttaaagaatgacaccacagtgaattcctagtttttttgttttgttttgcttttttttttttaattcccatgtttctcatcctaggcacaagaaagacctgcaattcagaactccaacagacataaaaataacaaaaaaggaaatgtccctctctctgtctaaagcatcagcaaaggggaagcctagaaggtgcttaatgaggacacttatactcagtaactgtggtgggcttgatctgcctgcaagaacagcactagtagaacccagatgacctgatccatcccatgctggacacatgccagtagccgcaggcctgatctgcctatagccatgttaccagcagagttcagggaccagcacctacctcacccatacctgctgacaacagtggggctgatccttgctgagttggagtggcaatggtggaacctcgactggttgattcatcctctgccccacaccaggtgatagttctggtgcctcatagttctcaaaccagaagagaaaaggaaggagcacatatttatcaggcactagaaacaaagacttgttatcaataaattctatactccatgaaattgttcttcaggaataaagaggaaagcaagacatccttagtttaaaaaaaatccaacaaagtataaaataagttgtatataacttcaaaaatgggcaaaagacataaacatatcaaataggatatgtcattggcagataagcaggtgacatacatttatcttaattagccattagaacatgcaaactaaaattacaatgatatatcaccacagacctattaagaaacagggaaaacaccaaattctgacaaggacgcaaagaaactggatcatgataacccaaaaatccccatgggtaggtaaaagtgtacagccactctggaaaactgtatctgtttcttataaaactaaacatgcatttaacaaaaacccagcaattgtacttgtcaatatttagcccagaaataatgaaaacatacacacacacacacacacacacacacacacacacacaaacacacacaatgtacataaattttcctggaagatttatttgtaatacttccaaacaggagtcagtagtgatgttcttcagtgggtaagtggttaattaaatcgtgctacacacataccatggaattttcttaagtgataccaaatacatatataaaagaatgaaatactgatatgtgccacaacctgtgtaaatgcaaacagaattacaatgagtgaaaatggtcagtcccagactgcatactgtacaatttcatttcacactgtttggaaaacctacaaattctagaaattaagaacagatttatggttttcaggacttaggggacaaagttagtaagcagggaggttgatgtggatataaaagtacaacataaatgttcttgtggtgctggaactgttcagtcagtatcttgatgttggtagtagatacacaaacttacacagttaataatattgtactgtaatctccccttaactatgaggggtattgtctaagatttctagtggatgcttgaaaccccagatagtataaaaccctgtatatatatattttttcctatgcatacatacctatgataaaattaaatttttaaattaggtagagtaagggattaacaataagagctgataacaaaatcaaatcgttataacaacatgtcagcatcaccacctttgcactctgggacaatttaaaaaattattttatttttataaatttatggcatacaaatataattttgttatgtggatatatcgcaaagtggtgaaatgagggctttcagcatatccatctctgaggttatgtacattttacccattaagtaatttctcatcttctaccccatctcatcctcccactcttttcagtttccattgtctatcattccacactctacatccatgtatacacattatttagcttccacttttacatgagaacatgcaatatttttctttctgtttcttttgagttatcacttagtaaaataaggatgtcttgaacacaggtactgcagtgccttgacattcaatctgataatcaagatggctactaagtaagcaatgggcctgtagcatatatatggtgtggatatgctggacagagatggagcaggagggagcaagatctccttgagctacttagtacagcatactattaaaagttctgaaatcgatcacacagacataaaacaattctcagaaaattctgaaaaacttgaatcataccaaacacactctcagactacagctcaattaaaaatagaaatcaacactaagaaacttgctcaaaactatataattacaaggaaattaaaccccctgctcctgaataacttgagtaaataatgaaattaaagcagaaatcaagaaattctttgaaactaatggaacacagataaaacatactggaatctctgggacacagttaaagcagtgttaagaggaaagtttgtagtgctaaatgcccacatcacaaagttggaaagttctcagattagcaacctaacatcacacctagaggaactagagaaacaagagcaaaccaactgcaaagctagcagaaaacaagaaataatcaaaataagagctaaactgaaaggaaatttaaacacaaaacaccataaaaaagatcaattatccaaaaattttttatttgaaagaataaataggatttctaggcaattagctagactaataaagaataaaagagagaatactcaaatagacacaatcagaaatgacaaaagtgacattatcaccaaccccacagaaatacaaaaaaccctcagagactactatgaacatgcctatgcacacaaactagaaaacctaaaagaaatggataaattcccagaaacatacaacctcccaagattgaaccaggaagaaattgaatgcctgaacagaatgataagttgaactggtaattcaaaactgagttgaaattgaattggtaatgaaaagcctaccaaccagagaaagcccaggagcagatgatttcacaagtgaaatctaccagaaatataaagaagagctggttatcattcctactgatagtattccaaaaacttgaagaggagggactcctacctaactctttccatgaggaaaacttggcagaaacacaacaaaaaaagaaaacttcaggatgaagttgataaatgtagacacaaaaattattcaacaaaatactagcaaatcaaatccagccccacgacaaaaagctaatctaccatgatcaagtaggcttgatactatgctcactaccttggtgacaaagtcaggtgtaccccaaacccccagtgataagcaatttatcaatatatcaaacatgcacatgtatccctgaacctaaaataaagtttaaaaaacttatgaaattgtttatttctggaattttccatttaatgttttcaaatcaaggttggccacaggtaactgaaaccacagaaagcaaaactatggacaagggataaggggagactactgcatagagtttactacacacacatacacacagacacacacacatacatgaagacacacaaacacaaatgagtagaagtaaaactggacatatctgaataaaataactggcttatatcatcatcatatcctgtctgtgatgtcttgcaaaaatgttttgcaaaatgttatcattgagagattcttagccctcttttcttaaaactgcatgtgtatttacaaatatctcaaaataataatttaaaataaagcaataacttcaaatttcagctctgacatgcaaatgacttgaaagttgtatttcccatcattacaataagatagagctgaacaaattgaaaatcaatattttttctttgacccattaaaggacaaagactgcatgacaaaccaccatcccaaaatctggggagaaaggatcatttagtgatatgcagctgagatctgcttacctgaggcaatagctgctagaaacataaactgataggaacatgtaaatgacaattttgacaaacgatggaggttaaatatggactagcatgtgagtaagaagcccctgaagctgcagtctgagggaagggtcccacatttttgtgggctttacatacaggaacaccacaggattcccagattgaagattgtagaaatatctagtcgtggttttaataacaggaaaggaagcataatcactgtgaaataagccctgaaacccctccatagaaaaggtgtatcctccagaagaaaagacttttaagggcatgcctcgctctccagccccctttatccttcctgtgtcttctaaggaaggaaaaaaaaaaccaaactggggccaggatttcaaaaaacacattggcattgctgcagctggggcagagaaaagggccctggagagaaagtatagtcatatcaccagaaacacatctgtgcatgttatactccaccaacatactacactacattacaatagtgagatttaatcagaagattatagaatactttccctcccccaaaccttcatatcacaccaacagggctccagtataatcatgaatttgagctggaagagctcatattctctctaagaagtgcttagaaaagcccaaagtcaagaggaaaacaaagctaggacagaagcagaatgtgaaattctgacacctatggctatagcacacattaagcacagcgtaactcctaacttgatgaccgtaaaccagcacacaagaggcctatgtaactcagtttcaatgacctgatacaatatacctggttttaaacaacaacaaaaattataaggcctgccaaaagacaagaaaaacatggtatgaagggacaattaaatcatcagaaaaagatgcagatatgatacaggcattggagttatcagacaagactttaaaataactgtcatgagcatatgaaaatctttattctttaacagaaagagtagacaacatgcaggcatagatgtgtaagaggaacagcaagatggaaactctaaaaatcaaaaggaaatgtaacagaaatgagaaatgcctgtgatggaatcattggtacactcaaaaagcagaagaaagaatcagtgaacctgacaataggtcaataaaaacttcccaaactaaatgcatagagaatatgaatgaataaaacatgacagaacacctaagaactgtgagacaacttcaaaagtaaaacatacaagtaattggaataccagaagaaaaggaaagagagaatacaactaaagaaggtaatgtaataatgactgaaagtgtcctcaaattaatggcagaccgaacaaggaattcaggaatttcggagaataccaagcagaaaaacgcatgcatgtgcgcgcgcgcacgcacgcacgcatacacacacacacacacacacacacacacacacacacacacacacacacacacaccctaagcatgtcatattcaaactgcagaaaaccaaagacagagtcttgaaagtatctagaggaaaggaacaccttacaaatggaagaacaaggacaaacattacaaaagactactcgtcagaaacggtgtaaatgttaataaagtggagtgatatgcttaaaagtattgagagaaaatccccaccgacctagaattctatattcagtgaaagtatttttcatacatggaggagaaataaagactttctgagactaatagaaagtggggggaattcacagccctcagatctaccctacaagaaaaataaaggagtttttcaggaaatgaaaatcaatatatgtcagaaacggggatctacataaagaaaaaaaaagcatctgagaatgaataaatgaaggtgaaatcttttatttttaaaaattcatttgaaagataactatttaaagtaattatcgtggctcaataccccaagcagtacctgcaactgaggattcttcccggggagatcgcagcccatctgcatggctcaagagttcgtgaactgcaaaatccagcctgggaagctggttgtgttcatcaagcccacctgtccatactgcaggagggcccaagagatcctcagtcaattgtccaccaaacaaaggcttctggaatttgtcgatatcacagcctccaaccacactaacaagattcaagattacttgcaacagctcacaggagcgagaatggtgcctcgagtctttatyggtaaagattgtataggcggatgcagtgatctagtctctatgcaacagattggggaactgctgacgcggctaaagcagattggagctctgcagtaaccacggagcaggccccatgctgacgtccctcctcaagagctggatggcattacatatgatgacagcacttcctggtggatgaatttggggacacatacagcttttttcctcttttggctccgtatttaaaagtggaccaacttgatcttaaccacagggccaagaaggttgatgggccatcttgattttcttctggatgtggtctttggttttcagaagactgtgacaagttctggcccaggattcgctcactgatcctcacttgttctctttggcacgcgtttcttactgttctccatgtgtcggcatgtctctacctctaagccagcgtttttcaactatggttatcctgacttcttctccacaatgatgaatccatagttggttatctgctactgcccgttagctgaaatcattttgttgcttgactttctggagtttgtattatgaaatcagtgggtattctgaatgtgttctttcaaactacatgcatctctccactcaactccacgccatcgcatcccatcccaccttgaaaatcactgctctgaaccagtgttctccaccttgtcctccacagatctcgtaggaaatgttcaaaaattctgtgaaaggtcgcaggacccaattggagaaatcatatgaaaagcatggttggtcttggtgtcacacggatcagaggcacaagcgcagaggctgtggtcatgcggaacactctgctatttaagatggctatccagataatcctgaacacgatgtatttatttgatttagactaccagcaaagattaaagcatgaaatgtaaaacatctgagaaaacttacagcccactataccaactgtgtatctgtgaaggagcccccacactttgaaaacttaagaatcccttatcatgaagtttgcctgttctagaattgtaagattgttaatttccttttgcagtctctagtgacgacacttaatttcttttctaataaaaacctatagatgaaaaaaataaaataaagtaattattgtaaaattgtattgggtgaatatagccaacaacattgtcacaaggataggagggagaaaatgggaattctctgatattgggtatttgctctgcccatgaagtggtacagtattatttgaagactgagattagtagaaaatatatatcataaatgatcagggcagccactcaaaaagtaaaataataataataataataacagataggttaacagatgaggcaaaattgaatcctataaagtgctcaatttaggctagggaaagaaaataaatggggttgggagacaaaaacaaaagcacaattgaagttatacatatgttgatattaatgtaactatttcaataatcagtttacataacaatgatctaattatataaattaaaataaatcatcagaatggattaaaaaacaccccagaacccaattatatgttgtctacaggaagcccactttaaatataaagatacagattgattaaaagcaaaggaatagggaaagttataccattcagcaacagaagaaagttatagtaattagcaaacactaattttttttaaagtgtagtagttgtatttatttcagacacagcagacttcagaacaacaaaaatagatctagcatgaagaggggcataaaataattataaaggattgaatctccaagataatataatgtaacctaacaatagaaaatcaaactacatgaggaaaaactgctaaaactgaaaatagacaaatttactattacatttggaaacgtcaatgctcatctgccagtaactgacagattatgtaggcagaaagtcagtaaggatatagacaaaatgaacagaactatcagtcaatttgttctaactgatgtttttagaatactccaacagaagcagaatagagtttcttttaaactcaaaacaaaattgaataagacgaactatattttgtacaataaagccataggttaacgttgtattagggaaagtatattacaaagtatattctaataccataacggaattaaactagaaatcaaggaataggaaactaggaatagagctggaaaattcccaaatatttggatattaatttgtatacttctgaacttcacatagataaaagaagtctcaagatgaatgaaaaaaatattttgaactaaataagaatgaaaatgtaacctactaaactttttggatggcacaaaagcagtggtgagagggaattttacagcattgaatatgtactttagaaaagaagaagtatttaaaaattaagattctaaactttcactttaagaagctagaggaatgacagaaatataaaccaaaagtaagtagaagtcaagaaaacataacacaacaaaaatcaatgaaattgaaaacaggaaagctatagaaaaaattaatgaaaccaaaaaagtcattaaattaataaacatgtagccaggctaaacaagaaaataaaaaatcagacaaatgaaaaaagaataatcattactgatcaggtttttaaatttgtgggaatacagttgttcagaatattaagaggaaaataataagatattctgaacaactgtatgcccataaatttaaaaacatgatgaattaaatagataaatttcttaaaaggcacaaaatgccaaaactcacaagagataattatatgacatgcaaaaccccatatctactacatacattgaatcaactaaaataacctctgaaaagaaaacagagccaaattattacactgttgaattctagcaaatttaaaattcttaaaatggcctcaatgattcccagcttttttatgccagcttcccaatgtgaggcaaggtgctcacattgtcttttatcagttcattgtcttttctcaaggacacaacaaacttgtatccttttgagggtccttttagataatggttccatttccttacatttattcccctcttctatctttcctactcctacttcaaagcttaagttttattttcttagacagaactttcctcacagtacttctaagtttgttttgtctgttatatttattaccatgtatgactttatatttgtatgatgtatatatgtatactactgtatatatatttgtatatgttatacatatatatttatattcacatatgcatatatgtatttgtatatatatacaaatacaaatatatatttgcatacatatatacatatgtgtgtttgtgtatgtatagatagatagaggaacagaaccaacccaaatgcccatcaatgatagactggataaagaaaatgtggtacatatatgccatggaatactatgcagccataaaaagggaattagatcatgtcctttgcagagacatggatgaagctggaagccaacatcctcagcaagctaagacaggaacagaaaaccaaacaccacgtgttctcactcataagtgggagttgaacattgagaacacatggacacagtgaggggatcaacacacaccagggcctgttggaggatgggggatgaagggagggaacttagagaatggatcaataggtgcagcaaaccaccatggcacatgtatacctatatagcaaacctgcacgttctacacatgtatcccccccccgctttttttttagaagaaatacagaaaaaaaatgaaataataccaattttccataatctcttccaggaattagaagcagaaaaaaagcttcttaacccatttgatgaggtcatagattaaaaacattacaatactgaaaccagataatgacattacaagaaagaaaaagcacagatcaatatctgtcatgaacttttgatgcaaacaccctcaacaaaaaattagcaaatcaaatctaacaatgtattataagagtataaaccatggacaagtggaaagtaattcaggtatgcaagatgggtttacattaaaaaattaatgaaggtaatctaccaaatcaacaggctaaatattcaaaatcatacattacaatcaattaacaatgaaaaaatgggaaacactcagcacccattcaaataacaaccctcaataaagtggaatggaggagaacttccctaacttgataaagaacacttatgaaaaacgtacagttaacatcatacttactcattacagactggatggtttttacataaaatgggaaactaggtgagaatgtcctctttcagcaatactatttgatattgtactagaaactctagatagcacaagaaaacaagaaaaaaagaaatgaaaggtatacaaattggaaagaagaaataaaactgtttttgataaggaaattacagtattgtttatgtagaaaatttaaacacccttccctttcccaaaaaagaaagagaaagcttctttagttaacatataagtaaagcacagtctcaggaaacaaggtccatatataaaaagtcaattgctggctgggcacagtggctcacgcctgtaatcccagcactttgggaggccaagacgggtggatcatgaggtcagaagatcgagaccatcctggctaacacggtgaaaccccgtctctactaaaaatacaaaaaattagccgggcgtggtggtgggcgcctgtaatcccagctactcaggaggctgaggcaggagaatggcgtgatcccaggaggcggagcttgcagtgagccgagattgcgccactgcactccagcctgggaaacagagcgagactctgtctcaaaaaaaaaaaaaaaaaaaagaaaaaagtcaattgctttcttatatatcaactataaacatttgaaaattgaatgttaaaagaaaacaatgcatttgtaatatccttgaaaaataatacttacatatcaatataacaaaatgtatctttcttttcctcatacatttattcacttctctatccattcatctatccattaaaaatatgtatgagcacattcacaatgttataggcactctataaataaaaattaatgaaaagtatgctgttcataaatttataggaagacaggttttaaaatatcatacaatagctgcgcatggtggcatgcacctgcaatcccagctactcaagaagctgaggtgggaggatcgcttgagcccttgaggtcgaggttgcagtgagctgtcattgtgccactgcactccagcctgggtgatataggaagcccatgtctctctgtctctctctatctctctctctctctctatctatatacttatatatatatatgtatatatgcttatacacacacatatatacacacacacatacacatacagatgtatatatgtatgcaaatacagatatttgtatatgcatatatacaaatatatacatatgcaaatacaaatatacaaatacatatatacaaaacaaatatatatagttgtatctatacatcatacaaatataaagtcatacatggtaataaatataacagagaaaacaaacttagaattactacgaggaaagttctgtctaaaaaagtaacatttaagctttgaagtaggagtagtcaacaaagaagaggggaataagtgtaaggaaatggaaccattatctaaaaggaccctcagaaggatacaagtttgttgtgcccagtgaactgataaaagacaatgtgagcaccttgcctcacattgggaagctggcataataaaagctgggaatcattgaggccatgctaagaatttaatttttttgaccttagtaaagtacattacctgtgtgactggtttttattacaatactaaaactaaattcaagtgcctcaagtcaaagtaagaattaactatgatgccaacaaggtgtgtcaaagaaaccaaaggcaagattataatagcctcaggaagaaaccaaaatatgatactgacatctgagaggactctcctaccatgagtcatctccacgtttttgccctgtttttttctaactaaccctttctttcagcttctcgggccacatggctgaactttccttgtaaatatagataaatgggggagatccggaacagccaagttcccaagctcactttgatatctatttataccatgctgtcccagcatatacccaaaactcattctccttgctacacttttatttgtgttgtgtaatcaagaatagcctctagtctttttccatcattttttcaaagctcaatttgaatcccatatatacaggagaattgaggaagcaggatgcaggaatagaaggctgcacccattatcccccatacccacaaggacatcaatttaacaactatctgcacaacaagcacctgaataagaagtgaaaatcaaatgggtacccacagcacctgtttttaatttcatatcacaaagaggcaataaagaggtagggaaaatagtcctgaatcactaaagccactgctcctgcatcccctgacagaggcaatgtggtccagagagcatttctgtgttcttggggagggagagcatgcaatgttggggcattgaactcatgctgacctgtcatagcctaaaacaaaaccagaccaaacacagctgatgcccgcgcatggagggatcagttaaaccagccctagtcagaggggaattgctgatcccagtggtccaagcttgacttcctgcaagccccgccaccaggagctaaagtgatatgggggccctaaatatacttgaaaagcagtctaggccacaagaactgcaactcctaggtgaatcctagtgctcaactgggaccagagccagtgacctgggggatgggggagcacatgacctactgagacaccagccagggcagctaaagaagtgatagcatcacctctcccctaacctccccacagctcatggctccaaatgaaaccccttccctctgcttgaggagaggagggagaagtgtgggaaggactttgtcttacctcttggatatcagctcagccacagcagggcaccagtcagagtcacaaggccccccgccttccaggccctagtacccagacaacatttc

SEQ ID NO: 94313 - DNA, 131884 bp, Homo sapiens
catctatattaggtatttcttctaatgctatccctcccctagcccctaaccccacaacaggccctggtgtgtgatattcccctccctgtgtccatgtgttctcatagtgcaactcccaattatgagtgagaacatgtggtgtttggttttctgttcctgtgttagtttgctgagaatgatggtttccagcttcatccatgtccctacaaagtatatgaactcatccttttttatggctgcctaatattccatgctatgtatgtgccacattttctttatccagtctatcattaatgggcatttgggttggttccaagtctttgctattgtgaagagtgctgcaataaagatacgtgtgcatgtgtctttgtagaagaatgatttataatcctttgggtatatccccagtaatgggattgctgggtcaaatggttcttctggttctagatccttgagaaatcaccacactctcttccacaatgattgaactaatttacactcccaccaacagtgtaaaagcattcttattactccatatcctctccagtatctgttgtttcctgactttttaatgatcaccattctaactggcttgagatggtatctcattgtggttttgatttgcatttctctaacaactagtgatgatgacctttttttcatatgtttgttggccacataaatgtcgtcttttgagaagtgtctgttcatgtcctttgcccactttttgatgggattgttggttttttcttggaaatttgtttaaattctttgtagattctggatattagccctttgtcagatgcatagattgcaaaaattttctcccattctgtaggtttcctgttcaccctgatgatagtttcttttgctgtgcagaagctctttagtttaattagatcccatttgtcaattttggcttttgttgccattgcttttggtgttttagtcatgaagtctttgcccatgcctatgtcctgaatggttttgcctaggttttcttctagggtttttatggttttgggtcttacctttaaatctttaatccatcttgagttaatttttgtataatgtgtaaggaaggtgtccagtttcagtttctgcatatggctagtcagctttcccagcaccatttattaaataaggaatcctttccccattgctcgtttttgtcaggtttgtcaaagatcagatggttgtagatgtgtggcattatttctgagtcctctgttctgttccattggtctatatctctgttttggtaccagtatcatgctgttttggttactgtagccttgtagtatagtttgaagtcaggtagcatgatgcctccagctttgctttttttgcttaggattgccttggctatatgggctcttttttggttacatatgaaatttaaagtagttttttcaaattctgtgaagaaagtcaatggtagcttgatgggtatagcattgaatctataaattactttgggcagtatggccattttcacgatattgatttttcctatccatgatcatggaatgtttttccatttgtgtgaccagtggtttgtagttctctttgaagtggtccctcacatcccttgtaagttgtattcctaggtattttattctctttgtagcatttgtgaaggggagttcactcatgatttggctctctgtttgtctattattgctatgtaggaatgcttgtgatttttgcacattgattttgtatcctgagattttgctgaagttgcttatcagcttagggagatttggggctgagaatatggggttttctaaatatacaatcatgtcatctgcaaacatagaccatttgactctctctcttcctattcgaatacctttatttctttctcttgcctgattgccctggacagaatttccaacactatgttgaacaggagtggtaagagagggcatccttgtcttgtgctggtttccaaagggaatgcttccagctttttccattcagtatgatattggttgtgggtttgtaataaatggctcttattatttcgagatactttccatcaatacctagtttattgagagtttttagcatgaagggtgttgaattttatcaaaggccttttctgcatctattgaggtaatcatatggtttttgtcatggtgtctgtttatgtgatgaattacgtttattgatttgtgtatgttgaaccagccttgcatcccagggatgaagctgactcgatggtggtggacaagctttttgatgtgctgtaaagcagcatttctttgccacctgggcagaccatctgcttaatcaagtacttggtttcagaaaccaccaaatggagtggagaaaaagaaaagggatcccctatccccaactccagccatctagattaagaaaagccagctgactggacagtagcacagcccagtcacctcatggacaaatttcctaggaaagaacctctcccatctattctacttatcactctcctttgaggttccggccacaggtgagtttctggaaaatgtcatcagaatcagaaaatgttagcgccaaagaaaacctaaagaataggtaccttttcctttgttttaagatgtgtcccaatatatttttctgtactatccaatttgttcctcacaaaaatcttgtggaataagtatagaaagaatagtgttcctgatttcacagtgaggaagctggagatcagttgaaggtgaaggaacagctccccactaggactgaaccagagctagtcttctgacctgcagggtcatagcccagcaagccacactttagctatccctgacagccccaattaggccaaaagcacgtcccacccacttcaatgctcccatggcacgtattccagtgttaggagcatgttatttatgtgattatttgtttagtgtgtcaccctagaacatagggattctaacctcagatactcaatcttaaacaaaatccttatgactctaatgtcagaaatcctatctttaggaacaacagggaagcaaatggtcaggatctagtgacctttagttacaaggaagtaggtcaaagtgtgggttaagactactttcagtgtctaccctgcatggatgggggagaaatgaacaggccaacatgctgcacgtttctcctaaacatagctcctcctgtgtctgttttcagatcttcgcctgctgctggaaatggccctctcagtggactcatcgtggcatcggtggcagtggagagtcagagatggcttcccccattgtccatcggaaaccacaccgctgctctctccagagaaagggagacagagctacaacttgacacagcagcgggtcgtgttccccaacaacagcatattccatcaagattgggaagaggtctccaggagataccctggcaacagaacctgcacaaccaaatacaccctcttcaccttcctgccccggaatctctttgagcaatttcataggtagagatccacttgtctgaacaatactctttttagagaaagagtctcattctgttccccaggctggagtatagtcgtgcaatctcggctcactgcaaccttcacctcctgggttcaagggaatctcccacctcagcctcccaaatagctgggaccacaggcgtgcaccaccatgcccggcaaatttttgtacttttatgtagatatggggttttgccacgttgcccaagctggtctctaactcctgggctccagtgatccgcctgcctcaacctcccaaagagatgggattacaggagtgagccaccacacccggccaccaatacatattttaaacaagtatttaccacttagataaactcagagatgctaccctctgggggccacctttcctttaatatccaaatgcatttgtcttaagaagttttttcattcattctttcattcaacaaatatttgtcaggttctatgctgtctcaggccataagctgggagctagagatacataaaaaaaatggagaggcagagagatactgtccttattgaatatattgtctagtaaaagagacagacattagttttttaattatataaattgatataaagttgtaactacaatagatacttctaaggagaggtatatggtgctattatagtgaataataaggaaatcttggcctagttaagaaagtcagggaattgaagtacaacatgaaagagagactgcattacctgagtgaaaagggatggacagaagtcagcagaatgttcctgcagacagacctgcacatgcaaaggcactgtggcaagagagagcaagatgcacgtggaaaacttgaaaacatcagcaactcttttgagataatgtatgagatcattttaaattaaaagttaaaatatgtgcttatatatcaccctcaatattgtaattattattataagtgaccatttactgagcaactgctatgctccagagccctctactgtatatcatgcaaatattatagatcatgtaatatttatgggacccctttaaagtccataatactatccccattttgtgcaagaggaaataagctcaaaaaaatcacacaacgagtaaataacaggaacagaatttaaatctaaatggttttccattcctgagaataatcatctccagtctcatccataagcatgacaaaacaaactttggggacttagggggaaagggtgagaaggggagaggaataaaagactacaaattgggtgcagagtatactgctcgggtgatggatgcaccaaaatctcacaaatcaccactaaagaacttactcatgtaaccaaacaccacctgttccccaataatctatggaaataataaatacatctagatgggtttggcttcaaatccattaccataatgtttgaggtgatactgaaagagaaggtttaattgatcaaggccaaacagtagggaagaaatgggggagaaagtacatttttcttctccatagtgtttattcacacttcgcttgcccctccagatgggctaacctctatttcctgttcctggtgattttgaactggatgccctccatggaagtcttccacagagaaatcaccatgttaccattggccattgtcctgttcgtcatcatgatcaaggatggcatggaggacttcaagagacaccgctttgataaagcaataaactgctccaacattcgaatttatgaaaggtaagaaaaaccatccctgtgttctctcttgcaaatgggttaggcaaactcatcagcatagcctcaggatgagtctcttttcttcgattttattttcctaaattatttaattcactgattctcaagggggggtgatttcgacccctagtgggcatttagtaatgtctgaagacatttttggttgtcatactgggagtagggggtactactgacatctagtgggtaaaatccgggggttctgctaaatagcctacgatacacaggacaccaccggggaacaattattaaccagtcaaaatgtcaatagtgctgaggctgagaaaacttgtttaagttgtataagcactcatattattaagcacacagatgcagtattattaaaggtgagttgaaagcttaagaattaaactctaggatggctggattatcttgggagactaagttcaggagaaactctttggaggatgtcaggcagtgtctcccaaaccaagaaaatgtctgccattttaaagcctcagttgcttgggttgaaaattcttgcttttagaaccaggtaggttttaggacccagagttggtacacctgttcttggctgcccagggtggaaaaggaagacaccygtaggtgacgtctacattccaacaggtggagtctcaaacaagtagaaggaagtggcctggtggatacacacctgttctctgcaggctctttccttgtcatgtttctcccctggggtttgcagcctggcttttcatttttagtatccttctgaaagaagagagaaaaattttcagcaaagaaggcaagtaaaagatgaaaattaaattatgagaattaaaaagacaacattgagcagagatgaaaaaggaagggaggaaaaggtggaaaagaaaagaagacaagaagcgagtagtggtctctaacttgctctttgaaggatggtctcacaaagagaaccccaacagacatcatcgtgggaatcaaatcaagaccagcaagtacaccgtgttgtccttcgtccccaaaaacatttttgagcagctacaccggtttgccaatctctattttgtgggcattgcggttctgaattttatccctgtggtcaatgctttccagcctgaggtgagcatgataccaatctgtgttatcctggcagtcactgccatcaaggacgcttgggaagacctccggaggtacaaatcggataaagtcatcaataaccgagagtgcctcatctacagcaggtaaagcaaaaaactctggggaagtcttgggcccagcctgatctttttgtggctgctatcactgcagttactgtttgtagaagggatggagtagggagatatcattattttatttcagggaagctgttcagttctctacagtgagctttatagtctacaatccagaaaaaaggaggattgagtcagtcttttaaaattaggaggtctttatcatgtagcattttcttcactatttcaaatgtgtctaacatttaacagttttgcatatattctcatctcctcttaacccagtgtggccatgagcacatttaaggctggttgaggacactgggagggaagaggcatcactgtatttgggggagcaatggagtattgtgttaggagaagcacaacaggagacmcactgcctgagttgaacagcctccagtacttactaactgcctgactttagacaagcaatataacctctgaaattcattttgtaattcctaaaatttgaacaattcctgargtggttgtgagagttgcaggagataattcttagaaaatacttagcacagtgtatgacatacaacaaatgctcagtaaatgcaagctgaaattgcattatttttagaatgtcaaacccaacgtttccttcatcactaactctgtttttgggagttctccctgatgttgtcttaaccaaagcaaagactgcacaccacctgtcctgaagctgagaaaccttgttttaacttgtgtaagtgctcatattattaagcacagagatgcaatattttttagggtgagttgaaatctgaagaattaaactctaggatgactggactatctgatgtcattagacatttatttaatgtcattttatacatgtcattgttctacaaaggtttcattgagcaaatgactaaactaggttgtcaggataggacatgctctcacttggcaaggaaagaagacagagttagagtgtgtctcaactttgtgataacccacatagtcctaaaagaagcaagggagttgagtctgggctcacagagagactagagggacaaagcaccttcagagctagcagttggcagcctaagatgatggagtctctagcaggtaagagcttgacttcttgctgaagaaggaaaacatccatgtctcacaagcagcaccctaggccatctcattccttttgactctccagcccagttcagcagacattccgcactggctctggtccttgttagaatgaaagaggcttgcttcgaggtatgtactccagccatttaggcactgcttacttctaaggaggggttctcttctccaggggagtgaaaggtggccagcttagagctggctgctgaaaggatttatgagtcaaactccacttggaaaattgtagccaggggaaacctccaagatgagtatctaatacaatgactttagatggtatttaccaatatcatccaagaacccctgcaagaaactccatgttcatccctcagcagcaaatgagcttcttgtctctttgcttggagggacacagttgcacgtttagaaaaattaatctgaaggataatttttttttccagctagatccaattgtcttgaatgttatgagcacactggacagccagagttaacatttagtcgttcctcgcctttgaatatgaaaattataaagagaggatgaaatcactgctggggtgtgatgccttcctttgaaaaagcggtgtttgagaaagcattgtttttcttttttttcttttcttcttcttctttttttttttttttttttttgggggggacagagtcttggtctgtcgcccaggctggagtgcagtggcgccatcacagctcactgcaagctccacctcccgggttcatgccattctcctgcctcagcctcccgagtagctgggactacaggtgcccgccatcacgcctggctaattttttgtatttttagtagagacggggtttcaccatgttagccaggatggtctcaatctcctgacttcgtgatccgcccgcctcggcctcccaaagtgctgggattacaggcgtgagccaccgcgcccggccgagaaagcatcgtttttcttttggcaccaatccaccgtcactttttgttttccaccttactgtcttgttttttttccatggaatatacacagtggcaagccaggaagctggtgcctcagggaggaatgcacgtgggctgcagtgagcctggtcctgttctcctcgctctgccagaatatcgcagaatcatggcctggttcttgggaataatctcagtgtggattagaccacagactcatctgtgctgggagctggcaggacctaggccaggctgctgytgttgtttccaaaatagcttccagggaacatcggaaaaccaagatgataacaatctagaaaaaagaaacattagtccaccagctcactggcagggaggagcatggagttttcatagcagtatttcccaaagtgtattcagtggaataacagtgacaaagaaatagtctccgaaaaaatacgtgcatggccaaattatatatgctggccctcctccaatggacccatagcccatgaaggactaagaaaagacacagcaaagaaacctgttcrtctttgattaactcagtgttgctttacatttactgggctttggaaatattttttaatatctaagtttgggaatttttactttttcaagtatacaaaaataattggctacagggaccagataggtaattaaatggactgaatagtttataaaaagcagtattactcayggactgataaatggccaatgacagttggcatcagtgttaggaggcaatagggaatggtggtgactatggcaaagtggggaggccatgcatttatcctaggaggcagagctggtcacttagcttctgctaattgttattatgtagaagtacaggcctagtgttgttgccagattgtctgagctttattagggcagctaaaaattaatatttttatttgaaataacctgacttttaactgattttatattattttgtaactgatgtaattttttcaaacacttcagacctatttttttgaaacctaaagttctattttgcttatgagcccaaaaacttgcaaactttgcttcaaaatattctagaaatctggagtctctgcaaaagaataataagtttctttttttgttgatgcttttttgaggtgggcagtgggggcaggggtcttggtacgttgcccaggctggtctagaacttggcttgagctgtcctcttcaaactcccaagtaggtgggattgcaggcatgccatcacttctggccctaggttcttcttttgaagttcatcctcaagggacagagagagggtatgaccttgaggtaagaatgcaggcctgggaggcagaggcctgtagtctaggcccagatctcagactaactattaatagcttaggaaagtcatttaaacatatagacctcagtttccacttttgtgaaatttgggagtcagactagatcttgtcctgtgagatggactgaggaagaacagaacccatagccaaataaatttacacattaatagaataaaggttctaggatgaccctcagtaagtagcctatcagctttgtttaacccagctgtcagttgagatgttctttgccacaagtaggagaaacttccattttaacaggtttaaacaacgaagagacttccttggcttaagtcattacaagtgtcctgaggtaggagggtgatcagcatggttcaatcagcgtcctagatccagctctcaccaatccttttcattcagccctcctcagtgtcatcttaactctcagggagacttctctcatggcaacgaaatggctgcagcagctccagccctcacatctacatgtgatcatgtatgaaaagagaaagaaagacacttctggtagccatcttggaaggtcaaggaagcttactactccctagagcctcctcacatctcagtggcctcacttgttcatccctaaaccaatccctaggggcaagagatgggattgtactaactaggttatacctgagccacagtccccacccacagagcccagcatgaagtcagcttccctgaaagcctatgggccattccaggaagatgtaaaagccaaagtttttttaaaaataagatagtttccagcagaatgaggaacagatgttggagaagccacctcaatgtcctcaacactatcactttaaaatatttttgagacttgactctttgtaaattgctttccacgtattagcaggaatatacacatcttgggacattctatactatatgtccctaaagtttttccacctctgaagtggattgattctatgaaagaccccaacagaggaagctaagacatgctattaaatagataagtgttagttattatcttaactgatggatgctaaaagacatatccttttgccatatcaaggacacatgacagatgtcaggaaaagaatacaagatttaagaggacaatttttttttttctgggaagcaacataagaaattacatctcatgccctagccctatccattttatttatttcacctcaaatttacacatttgagcaactgatgcttttttttttcatttttgtgcaattgaatactagagcccttggaattttgctcatgacctaagcccatgcatcatccaccctagacttgtttatactgtgaggaaatgtctttttrcaaacagcagaagccttgttgacagaattacaatcccgttagagcattttcttttaatatagcaaccgtgtttgtggtctaaaggtgacccattaatcagatttatggaatgacttcgaggagagattagcttcagaattgtattagtttagcttctcccagggctcagtttaatgaatctagaaaccataccagccacagatttgtatttttccatccagcttagtaaatttttatttgtattcagaaaacatgcagtacagagcagggaatgggaactgagggaatccagggtggttccttattgtaatgaaacctaagccctccacagtttcagcagctggtcactcacttattcatctattcagcaaattttaattcaagacttagtgtgtgcattgccatggcaaaccttatgtgccctcaaaggactctcagtctaggggtcacgaggaacttacaaatagctacaatgtcccacgtgcttcggtagcctacctgcaaagggacacagaagtgcagaggatgtggtgacccacccacctgcagaaacgtcaaggccaagggaagctttcagtaaaagaagtaaaatttcaggagagccctgaaggaggagcaacatttagccaggcagagggaacatatttcagctcacagcctgttcctgtgtcaatgaaatgttgtatgtgtggcttatgctggtattagaaagaccaggaccaagaaatgatagaaacttagtggaagaataatatagattatatatttttttaatctgactttttactgagacttggagcatctgtcttctgtaagtcaggcagctgctaaaataaacagctttctgacagcrtagcaccgagggcctagcctggcctggcctgcaacctgttttcttttgtctgttttcttttgtctgtgagtttgcacctgtgtcctcagggaaacctacaagggaggaagccagaggtcctgatcctggttatgtcactaattaactacatgacctaaatgaagccacttaagcagttggggccccatgtgtttcatctttaaatagtgatcataatatctctctggcatattttgtgaaaaggtgttcagatgacatataagagggcttgaaaataatgaagctatagaaataaacttcaggatgcaatgccacagggtgagtaaagcaatgaccttactggatgcttggcatggagggctttgacatgggacctgggcttttctcagagctgccatttaccaaatatgtggcctatgcagatacttggtcacttgagcctccatttcaacctatataaaatggrgccgatactagcccctgactcccagggtcatgtggatccaatgagattatctttataaattgtttagctcagtgcctgcaccataagtagtactaagtaatttttttgttttttgttctgttttgttttgttttgagcccaggctggagtgcagtggcgcagtcttgactcactgcaacctctgcctcccgggctggggattctcctgcctcagcctcccgagtagctgggattacaggcatgcaccatcatgcccgggtaatttttgtatttttagtagagacggggtttcactatattgaccaagctgatctcaaactcctggcctcaagtggtcctcccacttcggtctcccaaagtgctggtattatggcgtgagccaccacgcccagccagtaattttttttttaatttccaatcatctcaagcttaactttttcaatgccaaccccagcctgaggctttatcttttttgctgtgtgtcctacacatacaagggtggaattgctagttctatagttttagtgggaaaagccaaggacattcactgagccacagataccagtggacagggttataatgatttaaaagcaaaatctatgctttgcgctctcatttttcctgctagtctatgtggcagaattttaaaatctgaattcagcaaaactgtctagaggttagccctctttcttttatttctggccacagcacacttgaacatacccacaccaagatttagattcagaaaagggatgtaggtggcctcatctggctcatagcctcagccacttggtccaactcaacttcttaacatagactctatgttagaatatcatatttgtacagctgttaataaagctgcaatttggtactaatatttcctctgaataacagccctcaaggaaacccccaaaagaagatgaactgattgaccaggcagaatttaagctttgccagggctatctgaacatcaaaatacagtcataagcctatctttgccctaaaagtatattctggggttgctgcctgcaggtattaaatgagttactgcatgtaaaatgcttagctttgtgcctgtggcactcataaaatgttagcttaaatattgctaaggagagttcggtagccttgataggcagaagtcatcaygagcttaacccaaggggagtaagaaagaatgaccacaggctcgagtttggaactgcatgaaagaagacaaaaaaatctttaaccatagaactcgactccaagctctaataatataacaaaatgggcctcggggaggactctgaaaaatgcagacaacagaaaaacatccattatcattcctggctatgaaaagtgcagttggctggacttacagaccagcagaccattgcatccagccttcaggcctttgctctacacttggcaccaacaaaccaggctcctttctgaagcatccattttgcaggtgcccatgctactcccactgcctcaccctgtgctcacagaaggccataaaccatttgggcgaattcagcttgtcatttcaggagagaatgctttaggtcctccccaaaactcactgggtgggagagtcataaaacaagaattcaggtgtccctgatgctccgcactcttgtcatcaggcatgatttgtatgtccacgggtaaggatttatggcctctgttttgccattaaggagatcagaattccaaaaggtgaggctcctgttctcaacccaacctctgctaggtttatgtcaccttcttctgaggctcaatcagcttcatgcctcactccaaaacagagccacgagaccatgctgagccatgtcactcccaccaccatcactcatctgtccttgtagacacacctgtgtgaccttatgcaagttagataactttctgagcctgtttcatcatctatgaaatagggataatgataaaaataaaagctattccattattaggcagctaacctgtaatggaggttaaatgctgggttcattataggtagtcaatacatgtaagctaataatttaaaatatcattgttagaagtctccactagggtatctataacaaagatgttaaaatggccaaaggttaggaaaaactgcctttctactacctgtattcaagaaaaatatacaaggaatcaattgatatttactaaacactccccatgtgctaaacactatacccaaccctatgtgcatatagaaatataagacccaggatcatcgcagctcttagcaagcttcttacgtactttaaaatagaagatgcacacgacaattaggaaataggatggtaatatacagggaagtgtggcaacaagatgtgcaccgtcatgtccagtgcccaggagtgaaaagagaaaggcagcatttggatctgcagaggttaaaggatgagcatttgggaggcaattcatatccttgaatacccccaggctgaagaatcgtaacccatggctatgatcttgctggatggcacctgtgacttccatgtcctctgaagcactgtgtttccatggccatcactgcttagtgacattctatgtgcagttctgctttctttactgccaccacatggtcaaaaaggtcaggagtgggttatccccagacctggggcttcaaacatcctcccaatataaagaactttatactgtattaatgtaacccaaatgttccagccctcactagcttctgggtatgaatgaggtcccattaataaaaacgtcccagtgaccatgccattcagctccaatctgctgacttagaacctcagtcctcccaccctaatcctcagctctccacagatatatctaggcatcctcagattggtaaatatcacatgtgtcctccactatttccagcccagccaggggtcctggtcgccccccctcccccacccccctgcttctctggcctcagctgtttctttctggtgcttccctgagccctgcaagtctaatccacctccccaaccccattgtgatctgtaggtcacacaagttgtaagcagagaagccaggattcaaagcctctctcaatccctatgctgcagtcactctgtcgggcattcctctctcaccctgggttagtgacatggcactgagcattctgggcctggcattcgagcttcctgaaggacagccaggccagctcatcatcctgtgtggaatgggaagttccgcaagttaactaatccttctgaaaaatcccctctactctagttgcctgaaactctcttaataaaatccagatgcttgagaaatggagccttcagcatcctctcctccctctatttcgcctttcacctgctcccccatggcatccagttggctacaaacctctcttgctgtttatttacctcttaataatccctatctcctctcagaaagccatttagcactgcaccacttaattttcctcgtggcagaatctgccagatggagccttcatcccgagccatgttgtttgtctaatttttaaacagcagtgaacatggcataaaactaaaatagcagtcagttcccaggtgtggaccctctagtagggggacagtccagggtgtgtggatgtttccacctggggcagctgttcgaaacaggctggattaatgagagaatgacttctgcaggcggctcctggccagctgctggtctcccctgggcttcactccatgcaagagcatgctgcttttctgtatcagcaggattcggscagtcatcacctcccctgactgaacccccttgggctgtgtgcatccctgacttttccacagatatggtcctgacagtggaggagacaaagtagatgctagagaatcagcataaagtggcccagggcaagaaggaaatatccctgatctcattttttaatccccaaaattcctacaaaatgtgtctctgattccataacataactaagtttagttactataaataaaatttttcaaattttgtactggccaaactactgaactatgtttcccctaaactttttttttttaatgaatgcycccaaagtcatatggatctcatagctttattattcctagatgcctaccagggtatcctggaggtatgtgtgcttctgtttgagaagctcaaccctggaactgggctatctctgtcttggggaaggcaaacccacaacagtcactgagaatatttcttcaccactgcatgcgatcctaaggaagagaggattatgtctaaagaaaagacaggcwattataaccagtasagcagtgacctccttgggatccagcaagtaatgtaaagaagagagagactagtctgacttaccacttgtgggtggctcctttgatacttagatcatgacaggacttgacaggacaatactccagcccagctcacagaagtgacagctcagaaaaacacatatgccacaagctcctctccatagcactccatcttccagcacctttataatccacattctagaataagcagtgcagtcctttattacaaagggggagaatgagattcagtgttcatgggtggaggtgcattggccttgcctttgatatgcctctgtatgcagatactggccaacgagtatttatcaaaaccagtttgctctgggagggttggcgatcaggatttgctcagagtggaaggtgttctccctgaatccaatctcaaatactgggtagaatgctgagattatagcagtcaactgataccccacatycccaaaggcattatccagtaggacacagaagccaaagaagggagaaaaaaaaggaagacaagacagaatgagtgatacattctttgttccttgggacaattttgctataatatttaagaacactttaaagcactctctcaaaaagaaaaaagaaaaccagtctctccttcactctatgagattcttttctcacagagagtatggaccattccaatgcctgtaagtagccttatacttggatatttaacaggttttcccagggctactttgaagaaggaaaaatattatcccctgagtcagcagagagaccacgaggkgactgttacaatggcactcttagtgaaggagttcccaccctaaatatataaataaacaacaaaatgtttaaataatcaaatgtatttccaaaatggcacagggaaacaaatctggggtgactgcccctattattcatagaaaataaaagtgagggttggggggagatggggatggttaatgggtaccraaraaaaaaaamaaaacaaaacaaaatagaatgattaagacctagtatgtgatagyacaacggtgactatagtcaataataattcaattatatatttttaaataactaaatgagtacaattggattgtttgtaacacaaaggataaatgcttgaagggatggatatcctgttttccatgatgtgattattacasattgcatgsctgtaygaaagcatcccatgtaccccataaatatatatacctactatgcacctgcaaaaatttaaaggaaaagaaaagggatgtgggtggagtggaagcacagaatgagctgattaactgaaaggtgcttggaaacctgttatgtgctttcacatgtaaggaggaattattactaaaatgctacagacgcatcacccccagaatcctcagaaggggtctcaatagtcatttggatgacatttmaccrtgtctgctgcactgagctcccagagccacagagcacttccacagaaccctgtggttctttcgagttctaaagttgctccccaattccaatgtccctgtttattttatagacttggycttccaaatggaagcacctttatttcaggtggctggggaagtcttctgagaagatcttttataaccaggaagattggatcttaggaagacttgtctgagattctccagagggcctccaggmggggaggaagacaccaaaaccctcttcctcctcagggacttttgtgatgtcaaaggagaaaactggaattctattcacaactctttctctgtggaagagtagaygtgtcatgcccagtgcagctcagattccagcagaaacagaaacaagaacatgcccagaggggctcagcatcagtgaagaagcccagcaaaggaaagcttgcttctcccrgtctggctgccttcagaggcacccagcttcaagccagctgggctcagttagaaagaccacatgtgggatattagtttggtttcamatcccacacttaaagcrggacatttccaaatgcagacagatgagcccacacctccggaacagatcttgaaactgtgtcacatgaggaataattgagggcacctggaaagttaaatttggcttggcacacccmaaagtcttcatgggacacctgatgaatgccttaaaatatttaaagaatggtagaaggtggaatagaccgtattacctggaagagcagaactgtttaaatatttggttaggcagaaggaagactttctgaaatgagagttctttgaaaatacaatgcagccaggagcagtagctcacgcctgtaatcccagcactttgggaggccgagacaggaggatcacttgaggtcaggagtttgagaccagcctggccaatatggtgaaaccccatctctactaaaaatacaaaaattagctggacatggtggcaggcgcctataatcccagctactcaggaggctgaggcaggaggatcacttgaccccgggagacagaggttgcagtgagccaagatcgtacaactgcactccagcctgggcaacagagcaagactctgtctcaaaaaaaaaaaaaaaaaaaaaaaaaggatgcattgccttgagaagtggggagttccttagctggaggtgggaaggctgaggctgcagggaggtagtatacccaagcagcaaaaactgtgggttttggtgtcgggctggacccaggttcaggttccagctctgtttttgtgagactttgaaaaatttcttttgacccccaattacctcacttgtgaaatgggtatgataatatctactcctgtgggttattatgcaaagtaaatgaaatgttaatgaacacaagtgcttggcaggtaagaaatgctaaatttgtcattgttcctgtcactattatctcagcttgataaattggataggaagataaaataatttcctcagatttcctcagatttcttcggccctctaattccacagttactgtgaggtctcatttcatcaaaactcctggtagcatcctcctaattcctggactgcccagagtgttctgtttcagtgtggctccggatcttcctagacagtggcagagatcctcgcctttcctatcgtcactctccttataatcaaaaacaatctttcccatatcccagttccctgaaactctattttctttggtaataactggctattctggtaaatagtggatattaacagtagaaccatattaatatgacaatacagttaccttctcctttaaaatttttatcttttaaggaagcaagggctgaacacagaacttggtcaagaactggcaggcaagaaaaattctaaatgttcataagaacagattttgttttggtttgggttttttttttttttttttttttttttttgagacagagtcttgctttgtcacccaggttggagtgcagtggcgcaatctcggctcactgcaacctccgcctcccaggttcaagcgtttctcctgcctcagcctcccgagcagctgggactacaggcacgcaccaccacacccagctaatttttgtatttttagtagagacagggtttcaccatatgggccaggctggtctcgaactcctgacctcatgatccacccacctcggcctcccaaagtgctgggattacaggtgtgagccaccacacccggccaaagacagatctttactaatgagattctgtagattatgcctagctattctagagagattatgaggtggtcattcaggggtaaggtagaatacaaggcaatctcatgacaggctgacttggtggatagttaggtgctggtgggaccttcctctattctttcattagtgttctgaggaaacttaaagctcaytcacaccctgtctttctctcacccaagaaaagagcagacctatgtgcagaagtgctggaaggatgtgcgygtgggagacttcatccaaatgaaatgcaatgagattgtcccagcagacatactcctccttttttcctctgaccccaatgggatatgccatctggaaactgccagcttggatggagagacaaacctcaagcaaagaygtgtcgtgaagggcttctcacagcaggtagggctctttctaakatcttcaatggtaaagtcatagaraggatgcaagcctaccctactggaaaattgaactaaacctactgggtagaggggaaagtagtagatgcctccttttccctagcactttagatacactaaatcctaccagcagccctctgagatggatattatctgcatatcacagatgaggaaactgaggcttagtaaagttaaataacttgctgaaggcctcagagtttctaaatggggatccactctgttcaactgaggaaactatactctctgctctgaactgaggagtctaawgtctgttccatcatcactaggaccaactcctcttctgtgctcatccaatcccaactcactctgcccagctcagtcctagcaatctctcctgccacgaatcctaatattccttctgcccctcctaaactgcagcaaggtatcattaactatgtttccatttgtgtattccttaacttctcaacagtgcttaagcctccttgagggcagacagagatcactgatatcttttttttttttttttttaagagactgggtctccactgggtgcaatggctcaagcttgtaatcccagcattttggcaggccgagaggcaggtagatcacttgaggccaggagttccagatcatcctggccaacatggtgaaaccctgtctctactaaaaatttaaaaaatagccagccccgtgatggcaggcatctgtagtcccagctactcaggagactgaggcggtagaatcacttgaacccaggaggcagaggttgcagtgagccaagatcacagcctgggcaataaagtgagactccgtctcaaaaaaaaaaaaaaaaaaaagagagagactggctctcagtctgtcacccagactggagtgcagtggcattgacacttttgtttaatccccaccctttcataaatggtacctcagacatcatggagaaatcattattgtttggtgggtaaaagctctggctctggggtctgactgagatgggttcaaagcccaggtctcaccactcatcagccatctcaccttgggcaagttaccgtcctctcacaccttggttccctcatctggaaaatggggacaaaaatagttccctttccatagggtagttttgaagactaaatggtaggtacatgacttacttagcatraagataggcacatagtaaaagaccagggaacagttggtattaatatcaatgctttcataggcaatatgtgttgactgactgaagctgggtgtgatatcccaatttgcaattaaaattctccttgtgggagttgatttccaatatggtccctttctttaaccagggaaaagagtacaattttatcacttttcttcattctgccagcctttggctggggagaaatggaatgagtcagaggatttgggagaaggaaagcaaatgatttattcctcagagattctcatgagctagagtgcagttttccagactcaaacttctcaaaataagtttttaagttctaggagcaagggtcattgtaccttgccttgcctctctctaagcacctgataaacagctctcataaaaccctttttgtgtgattgatttggtcctcagaagcctgttctctcatgcatatcatgggaataataatagctatcccatggttttgctgtgaaattcaaatggtataaggaaagtaaagaacagaataaagagtttgctacccaagagactcacaataaatgggaaccattgctgctactgaggctgcagttgccaccactggaaatggaaaccaccaccactcactgtagatcagcatgtccactggtctccaggctctgagtcaatcactgagcaaggggcctgtctctgagttttctcaccctttgcttattacagccgcatttgctaaatcaccctagtgtttgcaaaaaggcagggtgagatctggtctaagttcacagagtcattctagacaagcaataacagcctgtttctgggctcagaactctgtagcctgcccttcgaccagaggctttcaagtcttttcaacagtaacaatgagaaatgtataaaatattacacatagatacacacacactcacacatgctgacacacatacacgtgtgtatatgcgtgtgaatgagtatgtaagaatgacaccttagcctcaccacatgcaaggcactctgagactttctatgctattctaccttttttttttttttttttttggacagtctcgctcygttacccaagctagagtacggtgrcacaatctgcttagtgcaatctatgcctactgggttcaagggwttctcctacctcagcctcccaagtagctggaattacaggcgtgcactaccacacccagctaattttttgtatttttagtagagacagggtttttgccatgttggccaggctggtctcgaactcctgacctgaagtgatccacctgccttggcctcccaaagtgtggggattacaggtgtgagccccggtgcctggcctattctaccgtttttgttttttttaaagttctaggagcagtaaaacttataaatctcccctttagcctccctaccccaacattctgaatgtttcttactctctctggcagtcatttcagtgttgtttcagttcaaccagtgacttctttttgtctttggcagcagttcccaaactatgttttgcatattaattagtcagatagtttgggatttagctggaatgaagagtcaggtaaaagggtcattcacactccggtgctatagaccagcctatttaatgagtctctccaaccctaaccctcagttctcacagagcactcgctgagatgatttacaaaaagaaaaacaaaaaagagagagaggtaaattcctatgtgaaaggaagattatttgagcttgaagctttccagggttctctactctgtctcagttcttgattctccccctcactttgctcaagagtgtttttttcattttagtaataataatagacttttattgattccatactaagggctttgcatgattatctcgtctatcctcaaaacaacccaatgagatgggcactattattgtctccattttatacaaaacgaaactggggcatacagaggtcctgtaacttgcccaaggtcactgagccgggaagtgttgaagcaggattcaaagccaggtttgtccagagcctcagttttttgttttgttttgttttgttttttgtttttgttttgagacagagtcttgctctgtcgcccaagctggagtgcagtggcacgatctctgctcactgcaagctccgcctcccgggttcacgccattctcctgcctcagcctcccgagtagctgggactacaggtgccggccaccacgcccggctaattttttgtatttttagtagagacgaggtttcaccgtgttagccaggatggtctcgayttcctgacctcatgatccgcctgcctcagcctcccaaaatgctggaattacaggcgtgagccactgtgcccggtcccagagcctcagtttttaaggctcagtacttcatctccctggccctttaactgttaccttgcgttcacacagagatgcttacttgaaagcacacatttattgttgccaggattctttccacatagagatagagggtggcagggataatgaaagtgggctcagcctgctccctggrgggagacatcttggctgctctttgcgaccttgcttctcccttatacttttagggcagaaagatttctgagtatggatagaactcgcttctggctaactcggtaccataggatttccctaacgtattgaacaaacatgttgatgagagttgcaagaaaaataaatgttgcaaggccaagtaatatgagaagacaatagattacaagctttcaaatatgtgttctgcagaatttctctgatactttaataagccccaaggagaaggacaggtgctattatgtagtatttctaaatatttaagcacaagaaacttttatcccaagaaacacatctcagaactactgtaggaggggtgggctaccactaagggatttgctgcaagtatattacaggtgttgaaggtgtatcataatcatcacacgggaagtttttaacaatatatatgcatccttctgtatcaccaccagtaaattatgactcactaggactgagtagggacttgagtgtgcatatttttaaaaattttctcccagacaatctcgatataaacctaccaccacctccttgaaaacctgtacaaccaaggagaggcgccatctccagtgcttccagaaacacttatcctaataatggggagaaaactaccatctaggtactttttactatatactagttcttttacatgcattgtctattttaagcctaagaycaccatgggaggtgggcattactatccctattttacacatgaaacctctgaggcactgaaagagcaaatctcactaatcatctcagagattttgaacacctacaaatatggtttgtttggaaatttaatatcttacataataagtattaatggctcttgatagtttattctccctctaagtccctactgtctttgagaccttcaccttgccaaaagggtttttactaaccacagagattactaggaacatctaaccccacatatatacccacactcatttttaccatcttctggatgatgagaattactatattcgggtaattcaaagtcagtaagacatactttgtcccagctcacatagatctgcatttctcacagtctgctaagcacttgtcccaagagacagttcttgaaaaactcatggtccgtggtcaagtcagattacagtttacaagtcaaattaagaagcttttgtcctgtgaacccctcttgcaggttccaatgttcattaacatattaacgtctctgagaaagcctggagtcaataggcctgttaaactttctttagccctgagctctccaaatttatttaacctaagaattatttttcagcacaaatattattaacattcctatggaccttttcagaaaatattagcctgaattgtggtacagacatggtcacaacaggtgaagggtaacaaagaagttgacaatcctcatggcttaagcagttcattcttccttttcctgtttaggttcaaatgaaattataaacattaaagaacttcttaaaagggtctttctcccatgacattgcagattatcctcaaggctgccaaagagttagtttcaaatcctttcctcagaattcttcttggactaaatctactttttttttcattggaacttttatcccaatgggccatctttgaatttataaaattattgacctatttttgagagattcactctcacttcccattgttaaaaaaagaggggaaagggaaggaattaggatttgctaaaaacctgtccagctggcaagaggactttattagagaattcaaacgtacagttttctctttggtgacattctgatacctgaaacctcttctgtaaaagagttttaacctaggaatttaacacctggaaaggagtatatagcattcattttgataaatgtaacagttatctaagccaaagaatcagaaatgaatgcttccagttagtgtttcagatcaaacatgtccctggctatctattttccaaatcactgaagcctaagtcccactgaagcatgggtcagatcattccccagggccaagtgggaacttgctatgccaagtatgatctgcggactagccacttcagtaagcatcactgagagcttgtcagaaatgcagaatctcaggccccatcccagactgaaccagaatctgcattttaacaggatcctcaggtgattcatgtgtacatgaaagtttgaaagacactggcctagagcatcaataatcaacgtaataatcatatgtatctgtttgttgctcaggttaaaaattctccattgagtctcccttttgactagcttgcatgccaccaatggttagtgcttttaagccatttgctcaattacgaatagctgctatagcttggatcctctgcagtgaaagtatgtaytgattttaaggtacttagaggagcattttgccaacaaagagttgagatccaatagggagaaatttattaccttcccagttcagtgatgtcaaacctcagttaaagcaaaaggtagcaacctatcttctaaccttgcctgctcttgagaaccagagaaagttcctctttcctgctagatttgcactgggacctgtccctgacaggcttctccaaatttcatttaagaatgaaacttagtgctttctacctgttgatcagtgcttaaatgttgagcacagatcacattttctaggattcttttaaaatatgacttcataatagtataaaatatcaagaagagattacaacagataactggattaaacacctatgtgccataggcagtttttctaagtgttctatatctattatttctttctactactcaaaaaaaccctgtaaaataggtgcttttattatctatttaacaaatgaggcaagaacagttaagaaaccctgttctctaggttaactgagctcagattcaaactcgggcatagttctttggttkgtttgtttgctttttgtaatggaaattttttttttattatactttaagttttaggrtacatgtgcacaacgtgcaggtttgttacatatgtatacatgtgccatgttggtgtgctgcacccattaactcgtcatttagcattaggtatatctcctaatgctatccctccccgctctccccaccccacaacaggccccagtgtgtgatgttccccttcctgtgtccatgtgttctcaatgttcaattcccatctatgagtgagaacatgcggtgtttggttttttgtccttgcgatagtttgctgagaatgatggtttgcagcttcatccatgtccctacaaatgacatgaaytcatcattttttatggctgcatagtattccatggtgtatatgtgccacattttcttaatccagtctatcattgttgggcatttgggttggttccaagtctttgctattgtgaatagtgctgtaataaacatacatgtgcatgtgtctttatagcagcatgatttataatcctttgggtatatttccagtaaggggatggctgggtcaaatggtatttctagttctagatccctgaggaattgccacactgacttccacaatggttgaactagtttacagtcccaccaacagtgtaaaagtgttcctatttctccacatcctctccagcacctgttgtttcctgactttttaatgattgccattctaactggtgtgagatggtatctcattgtggttttgatttgcatttctctgatggccactgatgatgagcattttttcatgtgtcttttggctgcatcaatgtcttcttttgagaagtgtctgttcatatccttcgctcacttgttgatggggttgtttcttgtaaatttgtttgagttcattgtagattctggatactagccctttgtcagatgggtagattgcaaaaattttctcccattctgtaggttgcctgttcactctgatggtagcttcttttgctgtgcagaagctctttagtttaattagatcccatttgtcaattttggcttttgttgccattgcttttggtgtttcagacatgaagtccttgcccatgcctatgtcctgaatggtaatgcctaggttttcttctagggtttttatggttttagatctaacatttaagtctttaatccatcttgaattaatttttgtataaggtgtaaggaagggatccagtttcagctttctacatatggctagccagttttcccagcaccatttattaaaaagggaatcctttccccattgcttgtttttctcaggtttgtcaaagatcagatagttgtagatatgtggcattatttctgagggctctgttctgttccattggtctatatctctgttttggtaccagtaccgtgctgttttggttactgtagccttgtagtatagtttgaagtcaggtagcatgatgcctccagctttgttcttttggcttaggattgacttggcaatgcgggctcttttttggttccatatgaacttgaaagtagttttttccaattctgtgaagaaagtcattggtagcttgatggggatggcattgaatctataaattaccttgggcagtatggccattttcatgatattgattcttcctacccatgagcatggaatgttcttccatttgtttgtatcctcttttatttcattgagcagtggtttgtagttctccttgaaaagttccttcacatcccttgtaagttggattcctagctattttattcctttttgaagcaattgtgaatggaagttcactcatgatttgactgtttgtctgttattggtgtataagaatgcttgtgatttttgtacattgattttgtatcctgagactttgctgaagttgcctgtcagcttaaggagattttgagctgagacgatggggctttctagatatacaatcatgtcacctgcaaacagggacaatttgacttcctcttttcctaattgtatgccctttatttccttctcctgcctgattgccctggccagaacttccaaaactatgttgaataagagtggtgagagagggcatccctgtcttgtgctagttttcaaagggaatgcttccagtttttgcccattcagtatgatattggctgtgggtttgtcatagatagctcttattattagtatatacaaaactggagagaataatatgatacatttctatggacccatcacttaatttcaacaatcagtttataaccagtcttattttatctgtctccccaccctctactctctgcaaattattttgaagcagatcttcaatatttcatttcactgtaaatattttactatctctgaaggataggatttttaaaatatatgattatattatcatacctaaaaattagcaacaattctttgatatcagctttcaaatcagttttcaatattttccatttgtttgaatcagcatccaaataagaacaagtattgagataatttctttaatctcttttattctgtaagtgccccatttagctctctttttaatgcatagtttttgttgcttaataaaccaggttgtttgtcctgtatgatttctcttgttgttgtagttgttgttttgttttgtgttttttttttgagacagagtttcactcttgttgcccaggctggagtgcaatggcgcgatctcagctcaccacaacttctgcctcctaggttcaagcgattcccttgcctcagcctccagagtagctgggattacaagcatgtgccaccatgcccagctaattttgtatttttagtagagatggggtttctccatgttggtcaggctggtcttaaactcccaacctcagttgatccgcccacctcagcctcccaaactgttgggattacaggcgtgagccactgcacccagcccctgtacgatttcttatagtctgtgagttgtcttcctgtggaaccatttaacatgtttttctgaccgctatacttttacaacatggtagtaggatctagtgcctaagtcggactggggttagatttggcatttgtgcatgtgcatgtcaatgttatgtcataggaactgcagtgtgctaccatctcaaggcacaaacatctatcttttttcactgttaatagtcattgatgatggttgtttagatctatgacttcaatggaatttgaaaaactagtgatattctaattggtttataaggaaaaatttcccttcgtgaagtattgggtcactcctaagtgtcctctgtagagaaaacggatgtttttgagtctttcctctcatttacattttcaaaataatgagttggttgcctaggatcctccaaaggtgttcagtgggtttttcttttttagcatcaatatgaactcatggttttaaaaatatctgacatatgtcaaatcaatgcatttattgtctttcattattgccccatctctagccagtgggagcttcttaaaaatgagaagtggctcctgagtccttttcacataacgttagtggtctttggtagatctggttccttttaatagaaaccacaataagtacatgctagaggagtttattactattgggttgattattatttctatgccatttaaatgaacagaactaggacacttttaagattaaatacatctagattcatgctgacccttcaaattcaagaatagaggttttttagtccacctcatccacattaaatacgtaatctttttcccacatcaggcaaattccttatccactgcattacaccacccccttttgatatttaacactcacagaaattctatgaggttgaaattttaggaactagcaacatattagagatgagaaaataacttcagagagatcaaatttgtcaaagattatccaggtaatatagtgttgagaccaaattagaactcagttctgacgtacctgattatttatcccattgcgggaaatattcttaactttctttagatgtagttttatttctcaaatgaatataattttcatatgtatgaaaattctaaagctctataaatgttaggtttaattatttataataatgataacttgatggtgatggggcaaccctatgaaaaactgttacttttattttctatagacttctggcctccttgtggtgatctcctccagtcttctacttgcatgtgggtacacactctcctcacacacccacacaatgtcccctcttcccaatgtctagcattattttcacatttctattgaaaggtcttttcctttagagccttacgaggaaactctgctaggtttgtgaaagatgaaattttgtttgtttgtttttgtttttgtttttgtttttgtttttatttgagacggagccttgcactgttgcctgggctggagtgcaatggcgcgatctcagctcactgcaacctctgcctcctgggttcaaaagattctcctgcctcagtctcccaggtagctgggattacaggtgcccactaccatacccggctaattttttgtatttttagtagagacggagtttcactatgttggccaggctggtctcaaactcctgacctcgtgatccaccctcctcagcctcccaaactgctgggattacaggcgtgagccactgcgcccggcctgaaaggtgaaatattaatggataatatcttaaagttatggatgatagcctaaggtattaatgaattatatcttaaagttttctccttcccaccacctccagtacccaagacaacgtatttacattttagtattggccttcactgtcttaaccaattgtaggtatttaaggtcaatgtgggaaatatttgatatctcaaatgaaaaccataccaatctaatatggtatacggattagttaagactcttggttacatgtgacagaactgtaattcaaaatagtgtggacaaaaaattaaatttattagaaaaatatggggtgggttggacctcaggttcatgtggaatgagggcttcagaatccatcagtatgatgtccatctcttgtctatgtttcttgtgatatgtttggtatgaatctttcaaaccaacttccttcatgtggaatgaaacgtggtaccagtagtatttgtgctttatagcttaacccccagagagggtctagcaaccttccctgatgtctagattgaaaagcatcctggggaaacgtactgcctggcctggctggtacaatgtacccattcctagacaaattaactctggccagaaacaaaggactctgtgattggcatcctccacttgaacctcatgtttgaaattggtctgtggggtgtgagagttctgaacagcacagcaataaatatccattatatctatgactcatcagaaatatataaacctaacttatgtgtgaccatggtcgttcatccttaaggaagggggcttaataccctctgtctctctcctatagtccctagtgttattcctcttcccaaaaagcccttcccttctgacctctctctgcctaggcaacactctgaccggtgtcccacaggtaatcactccttcctctgtgctcccatggactttgctcttgccactctcaactattatagtccgttcaataaattcatttactcaaccaccatctgatgaggtcctcctgttgccagacactgtactaggatctttgttttgtggtttatcagcagaggtgacacattgtgatcatatctctcatgaacaacttaatatagtttcttgaactgaaactcatgctttcttctttgtgaatttttttgccaaaacatgaggtacaaagtgttggatctcatatcatcttcttgtgtttcagttatccacagcaagaaagaatttgtacagaaaagtttgtctgtgtaatactcccttaaggtgccactggccatctgatggcacctgcccatatttcaggcatcagaccactcacacattcattcatcaagtatttattaaaagccttctatctgccggatgctgtagcatgctctggggacccagaagtaaacaagagagatacagggtgcgactgcatgcccttacagggaattacacagacaattgttaacaattttgccaacaattagttccttttagaaatgacagaagaaatcatcctatttccagtatttgcttggcatgccaagcccatgccctgtatgttcgggaaatgccatagcaagatctcaagattacttttagtcagcccaactgggaaacagaatatttgtccacttgacaaaagggaactcaaactgtaaaaaatccttaagatagtctccctcagagccctccagcccaatctgcctgcttttgtgggagaatcactagggcaggcagggacctctagagtgattgaatatgcaaatgatttcctcatccagagccagaggaaagtaactgccagtcactctgttgtgggttatcttgaaaagaaccttcacctaccaggaagcagaaaggttatcaaatgctggtaactgtcattagttttcagataggattctcagaaatcagagggttgcttaatttgtataccaggaagaaaacctcaatcacctagctcagcagctggggcgtgaagaacatttgctttcaccatttagacaactgataacttaaaatgaaaaaaaaaactttagtgttcttccaaggttgcaacatacctcctgtgtagcttccttggttggcatggtttgcctaccctgtaacccctattccttggcacagtcagctgagcagtccacacaggacggtcagtgccgccattttgctatccttatccccaggttgtggtggctctccttggtattcctttagcctgggaatcatgtagaaacagacaccaagagtttcacagaagcatggcagtcactaatccaactcgtctttttggtaaacattcttgactcttggtaaaaactaaatacataaatgatttctatgtttgaggaaagagttttgttggtttccctttcttcaatcgacagaayctttcgtgaatgatatttcctaatggacacggagggatttcaaagtggtctaagatgttcttctaaccctgtaagaactttatgcctatgggttccatttaaaaaaaaaagaccctttgtgactataaaaaaaagaggttgtcctttcaatgtccattatttaagaatatatattaaaaccaaaagctacagtgaatctagtgawgtggtaaatgaaattttaatttattaatctcaataattcctttggaaatctgaaagatagtggtacatgcatgtgtgagacttatttttactctgtctayagacagcatttgggagcatayaggggatttgtagacaagatgcagtagcttaatctaccaatcaggaaccactagcttacagaaacagcttggtagcaggaattacttaacagtctccttctttcttttcctcccttgagtcattccactcaagtcaaagccccacagtgggagtgtttaatgggcagggcatcacgacttaaattcccatcacaattataaaccagaaaggaaaggcagtttcccacaagaaagccagaagtttacagaaaaaggatgaaacagaagatgggtagccagaaaacagctatccattacaaacaatttcaaaagatcattcatatatttatttaatcatgtgtattgatcaattcgatcattaattgtaaagacttaaaggaaataagcctagaaaagtaaaacttgaggcaagcgcaagggaaatggcctattctagctaatggaatatattccagcctgagatggcaggcttgctgtacctgggacacaggtgagtgaggaggacctcaaccccggggagtgattacgccctggcaccaggcccactttccttcgctctcaaagataccgctattgacacatctgagccggactgggaactttgagttgtcttatggctgcaatcactgatttgtgttaatcacccctttcttcccttgattctcacttactgtcccacatgactcctctatcatagatagtaaataaaagcttgaatgcacgcatgaatgaacggaagactagactggcccaatgtgggatctaggactgtgactacattttttatttgttgagccaaagaagtcccataaaagaaggggtcttactcccatcaatcaaagttaagactgtacctggggctttttctacggcatgagtcagcctttacagtgaggtctgctttgcatctcctcacccatcacctttcaaaatacacacttctaatatcaccctctccattactaaccttacctcaacacatctttatggtgtgcctgcaaaaacaaggttattacaggagatgccccagaggaagatgacagtctaccagaggatgcacagatctaggcagagatgttcaatggaaacagcagcagtggtggcagcacatgaaaaggagcaattctgattggcgggggtggaaccttctatggggattagagtgagcttcatagagggagtggccaaaaaaaaaaaatttaaatgcttaaaaataaaaattatcaaaaaaatgtcttctaggccaattaatgccttaactttaacccttaccctttgtaggtactttaagatgcaaatgtgcttggaagaggtaacacattgcactgcttattcattataatttttgtatattttctactataaattagagaatgtattcattcattaagtccttcagaggaattgagtaatgaacatagaaaagaaatagggccaagaggagagcttataaatactcatctttcctctgtgcatccaaataacactgtggttaaggagcagactcttagggagtgagcgatgctaaggttaaagcctgttgtccggctttgctgtctggatggcactgggaaaatcacagattttccctaagcctcaattcctttatctctgaaatcgggataataatggtacctacctgatagaattattgtcagaatcaaagaagatggcatgtataaaatacttagttgattcttagtacacaacaagcattcaataagtgctgcagaataataataacaggagaggaggaataaaaggtgatgatgatgatvatgacgatgacgacaatgactttggaatctgacgatgtgaatggcaatcctgactctgttacttaccaaccatgagacactttagtctccatctgcatgtctgtccaaacctcttaaggtttttgtgagaactttatgacaggtgtctggcacatagtaagtgctccagataggtaggtctgacctaaagagctgcagagacacacactcttctctggaaaggattggtcttttcctgtgtcttaatggctccctaggccttttgctggaaagcaagactttcatcaaagggcagtgccttagataaaaggctgggtcaagaagaagtgtccagttaggcgagctgcttccataatctaagaaaaactacagggtagtgagaggacattacaccgtctcacaagggaatcagaaactcctgaacaaggttaaaataagaaccctggccaggcacgatggcttacacctgtaatcccagcactgtgggaggttgaggcaggaggctcgcttaagctcaggagtttgagaccatcctaggcaacagagtaagacccccatctctataacatatacatacacacacacacacgtatttatatatgtatatacgtatatacaacatatatttatatgtatatacgtatatacaacatatatttatatatgtatatacgtatatacaacatatatttatatatgtatatacgtatatacaacatatatttatatatgtatatacgtatatacaacatatatttatatatgtatatacgtatatacaacatatatttatatatgtatatacgtatatacaacatatatttatgttgtatatacgtatatacaacatatatttatgttgtatatacgtatatactacatatatttatatatgtatatacgtatattaatatatatttatatatgtatatataatatatatgtatatacgtctatataatatatatgtatatacgtctatataatatatatgtatatatgtatatattatatatatttatgtatatgtaatatatgtatatataatatatatgtatatatgtatatattgtatatgtatatatgtatatatgtatatataatatatatgtatatatgtatatataatatatatgtatatatgtatatataatatatatgtatatatgtatatatgtatatatgtatatatgtatatatgtatatgtaatatatatgtatatatgtatgtatgtatatgtaatatatgtatatatactacctatgtatatatgtacatatgtatatatactacctatgtatgtatgtacatatgtatatatactacctatgtatgtatgtacatatgtatatatactacctatgtatgtatgtacgtatgtatatatactacctatgtatgtatgtacgtatgtatatatactacctatgtatgtatgtacgtatgtatatatactacctatgtatgtatgtacgtatgtatatatactacctatgtatgtatgtacgtatgtatatatactacgtatgtatatatactacatatttgtatgtatatatgatatatagtatataatatattgtatatataatatattgtatatataatatatattatgtatttataatatatatttatgtatacataatatatacatgtatatgttatatatacacgtgtatatataatatatacactatatatacataaatatatacataattatatacataaatataaatatataaatatataatataaatatatataatatataaatataaatatgtatgtatatattatatatacatgtatatataatatattatatatacatgtatatataatatattatatatacatgtatatataatatattatataattatatatatattatatatattatatataatttataatctttttataatatatattatatataattaatatataatatattatataatatattatatatttttatatatatttatatttatgtatataatatgtacatgtatagtacataaatatatgtatatattatatataaattatatatgtatatattatttatacatatgtatttatatatgtatatataatatatacatatataattttattttataaaatataaaattcgtcaggtctggtggtgcacgcctgtagtcccagctactcaggaggctgaggtgggaagattgtttgaacccgggaagtcgaggctacagtgagctgtgatcgcaccactgcactgcagcctgggtgacagagtgagaccctgtctcgaataaataaataaataaataaataaataaataaataaataaataagaaccctgacaggtttgtaaggctcagcagttctctgtgtcttgagctggcccagcagctgccctggagggaaatacagcaaattcttaaaagcaagcagggcctcagtggttgtctttgcagccagcaggacccatatgcccctctccacagcccctcttcctccaactgaagaagagagcccaggggacaagtagctagaaagagcaaggtcaccttttcatgaaaagaggaagatggggacaaaagtcctgtgctcagcaggaaaggagacacagcaggaggaagggacatttcaggagggaggtggctaggaagccccaacagaggaacaagagtcaaacttcaccattgctggggcccggcaggtgtgattaaacaggcagcagggactccgaggcattacagaaggatcattagtgctcagaccccactgccagtcatatctgaaatgagtttggatttagagacccaccactgagctgagtggtgtggatcaggagtgaagcacatgacttaatcaggggcatgaaagcagctgacaaattacagcatgatttgtcatcatcttggagctcagcaagtgtttgtccctgaaagaatcaatacctggagggaaaagggccatatttttagaaactcctggatgggtaatttatttcaagtgagtagagagtttatttatgttggcaccccctcaaatccaatggacagtatatttacacgaagccagaaaatgctatcatttcttttaatcaatttacccctttgaacagctgtaccttgaagctttcagtgataaactcacgccctttgctaaaagctctacccaggaaaccatctccaatcccacctttaccactgctgccttctgtttgggtggaatgttacatgtttcaacactttaacacatagattctgttttttgaggcacaattaagatgggcagggcaggtgatgttagccccattctacagatgaagaaacgaaggctcatgagttgaacgtaggattagtcaatgtagaggagagtcagaaagcaagatctccccacctcaagttgtgtttcatccccattggactaaaagagtttgtacaacagaaatgcctttaaaaaaaatacttagctacaagactgttcaccaggaagcaatgtgctgagtaagtaaggagtagagggtctgcaggtgaacttgaattaaaatcccagcccatgagatttaaataggtttgaccatggggagccttctttacctttcagtcacagatttcccatctctaaagaaaggcaaattaaagctcctacttcatagaatgacggtaagcttgaaaataaataataaagttcttattacagtgtctggcagaaataagtgtccagtaaatgctatttattttgctctattagctactattttcacagcatttttataacagcaaaacaaattgaaacactatacctattaaatggtgaaacgattaaaggaaatatggtcaattttgctcctggaccaaactgagggttgggctgctatttctcgtggcccaataacaagatgcagatgaattggggaggaagagagtttttatttctctaaccagttacagggagaaggcctggaagttattgccagaccaactcaaagttacaaagttttccagagtttatataccttctaagctatatgcctacgtgtaagtgtgcattcatctgaagacataagtgattaacttcttttaatctataactaaggtctgggtcctgaagacctacttctggagcctcagtaagtttaattaatctaaatgagtctaggtgctgaggtgattactttatcttgtctcctgacaaatcataaggatttggggagttcctttagacaccattaaacttgtttgtggaggcctggggagtttcttcagaccaccaattaaacttatttcatcctgaaaagggtcctgataagaattccttcattatcctctcatgcttcaagtcccaggaaaagcctaggcaaccttggtgggatctttgttacattccagccattgtataaggacactggctcaatcagcttttaatgtttaatctagctactcagtgctgggacagttgtaatgaacactgaatctcgttgttaaaatgtgtaaatacacatgtatatacctacacaaatatatgtgggtgtggagatatatatatgtgtgtatatgtacatatgtgtgtatgtgtgtgtgtacatgtatatatatatgtatgtatatatatgtatatatatgtatgtgtgtgtgtgtgtatatatatatatataaaatttttttttttgagacagagtcttgctctgccaggctagagtgcagtggcgcgatcttggctcactgcaacctccacctcccaggttcaagtgattttcgtgcctcagcctcccgagtagctgagattagaggcacacaccaccatgcctggctaatttttgtatttttagtagagacggggtttcaccaggctggtctcgatctcctgacctcaggtgatctgcctgcctcagcctcccaaagtgctgggattacaggtgtgagccaccatgcctggctaatggatatatatatttaaaaccctggaaatattacatgcgcaagcattttagctgtggatatctctatgtggtgtgatttataatgccttctttttaattatctatttctgtggtatcgaatgtgataaccactagccacatgtagctatttaagcttaattaaaatcaaattaaattttttaagaaaacaattccttagtcaaactaccacacttcaaatgctaaatagacacatgtgattagtggcttccatactgcacaatgcagactcagaacattccatcattgcagtaagttctattagatctgggctacagccccacacccaggcaggtcagagaaatgcaatcagggtaatcacctccctctgccctgcatcaaacttttcactggcatttgctttctcttccttaatgaggacttaacttttttttctgacacattacarctatcaaagtgtgacaaagcatggattaccttatttgcaatggttctaacagtgattagctctcccagtgatcctattaaaactagatccctctgaattaataaactcacagagtcctctctctcacaggaggtacagttcgaaccagagcttttccacaataccatcgtgtgtgagaaacccaacaaccacctcaacaaatttaagggttatatgtaagtatctcatgtcccatgctgctagtaaatatctccgctgcagctagaaaatatattgtctagaaatgaccaaacaaataagcatcttcatcctgaggaattttatttgtgtgtgtgtgataaagagggactagagaaatttaaattgggaaactttttctatttttttttttttgctgagtgatagttatttatgttgcagggttaaattcaccaatgttgttaaaaaaaaaaaaaaaaaccttagtaaaatagcatcaaaatcaagattgtgctctgattcaggaaggtgaatatgatttaattaagatcaattttttaagtgcctatattgcattgtaggtaagaacagggactttggaattggacagatctgggtttgaatcggggttctgcaaattacaagctgtatgaccttgggtaaattaattcacctctctgagcctgtttccacatccataaaataaaattataatatctatatcaaagggtttttcttttctaagattgtcagcatacacaaagcccttagcacagcaactggcagagaggaaatattcaattaacagtggctcctgctattaggataattgttattcttattcctcaactttggttcagcctaagcattttactgcaattctgctcccttatcagaccactagtcttcccacaaaataagagccatagtaacagatgtgagtaaatgcccttatacgatgcttttctacaggggtgtccaaacttctggcttccctgggccacattggaagaattgtcttgggccacacataaaatacactaaccctaacaatagctgatgagctaagtagtaataataataataatctcataatgttttaagaaagtttatgaatttgtgttgggccatgttcaaagccaccctgggccacatgtgggccatgggttggacaagcttgctataacagttttcagaggacttctagagaacattgtcatgtgtaatcttcacaacaaccccagaaagcgaatatcgtgatgtggattatgatgatctgagactttatagatgcaaagattctccctaactcacagcaggaacaagacaaagccaggacttatatgggggtcttttgactccaaccccagtgtgctttccatagccgtacattgcggagctcagccatgttacaccaatttctccaccaatagggcctgcagctccctgaaatgcagttgtctttgctttcttccacccacatgtcctcaggccatgagggatataatgaggagaaatagaaaggagaaacaataagaagaataccagagaaaccatagcttttataggcaaattacttttaaaatacacagagcgagcagaaggagacaagcagagaagggcctgaggtcctggggaaaaggcctttgctgcaaaggaggtaaagcctgtcacctgctctgaagagaagggcgccccttgtgccttaggtttgtgaacttgattcatcccaaatccctcacgccttgagtcactctccatatcctcttagagaacagcctcattgttagatttctgtttaggaccctttctccccagaacagctcaggctaacagccagcctttctcagctttcaacctgctccagcctgcccctctcagacggatttcaggacagaactctcccagcttcactcagcccccagcacctcctcttcctagttgctgctctgggagacctgtccttcctccacatgactgggcctcatggatgagtcctaaaagtccagttggactgcggagtagctaacccatggaatgaaggagmattccttgctgtgctcctacatccttgctgtactcagcaagaacaccctcaggcctggcacccacagatggtctccaccttcttcctgagcagacccactggtctgatgcctctgggtttcccagaagcttctgtgggttccgttaatttagaagctccctgaggctgcacaggctggctagaagatcaacagctttcaatgatctgtttgaaagttagggtgtccaatttgaaaatgcgacttttgaatgaaagaatctctacagagcagtggttctcaaccagggacaatcaccaccaacaacaaaaccacccctccaaccaggagacatttgacaatgtctagaatcatttttcttgccacaactggggaggggtgctgttggcatccactgggtaggggccagggatgctacaatgcacaggacagccccccaccccagcagagaattgtgtagtccaaaatgttcataacaccaaggttgagaaatgctggcctataaaaagtataatagaccatccttgtaaaccaagagcgctaaatagacaacagctataagatagcaaatccttttctaccattctttgaaaaggaacattacaaccgagagaagtagaagcctctctcatatgctatcacttcagaacatcctaaaattattcttgaaaccacaagctactgacagtgagacaagcaaggttcattagcccagtattaaatccacagccagcctcctccttaataaacagaaggagcaatggtgggtcctgaacctcagacattcttagaccacctttatgatttttatcatattcagtaaaatctattttatctaccagatttttaattaccttactttttccaaaatttatttgaaaaggaaaatttatatcactgggccctatgggaaaccaggatcacttactatacttaagaggtaaaaattaatacaatgaaatcaaaacagttatattctaactattatttgccatagcatcctttgctttaaaaagtaggatagacaaacattagaatagggtcaagaacatactagcaagaaatgaaacatcctccttgacatattcagcagaagtgaaaatagaaatgactctgatttagtgtgggtgagtggggtagtactttaggtaccctaaggtagtgaaaatctcagtagggtgggtgtctgtgacctagattccctggtcttaggatgtctcatgtactagttgtatagccttggaaaaatctcagccactctgagcttctactttttcataaataaaaataatcatcctactaacttcccagaccacaaagagtcaaacaaaatcatgtaagtaaatgtagtttataaacacagtgaggaatcattagcattaaaaggcatattgagtggcagtatagcactctggggccagactagttttgaatccccattctgccacttcctggctttatgaacttgcctcagtttccctatctgtaaagtgggtatgataataagccctgtcttataaggttgtcatgaggcttcagtgaaaaaggcttataactggacttagcgataagaagtattgaagaacaacacgtttaaaaaagagctctaagagttcggattattatttttttgttctcccaaataggtttggaaagttatatttaagcttgctgaaaatctcaaaggaacggcatcaggatagagtaaaggccagaccccaggtcataactagagttgattggactcagaagtttctagtgtgaggtggaaaactgcaatgctccctggactagaagaaagaagaaactatctctacttttaggatctgcctcccaataatttgggcaaagggccactcctgtgaggtctattttatgagctgttgagcaggtgaaagctggtacaggaaagaggccgagtgagtgatgtggctcggaacgagaggaacccatgacctgcccttccttactttaccattcttacctgtcccctgtcccctgtatgaaaagcaagactacctggaggctccccttggaagttcaccttctgcagttcaggtccccagaagctgaatgacaatgagcatgtgaacactgccagtccttgtaaggccagaagccagttcccttgcacttttgtttgcttatttgttttttaaagtgacaggaagtttattaagaaagggataaaagaagggtaactccatagcagaacagccccttgcccttttttttttttttttttaagatggagtcttgccccgtagcccaggctggagtgcaaaggagcaatcttggctcatggcaacctccgcctcccgggttcaagcgattctcctgcctcagcctcccaagtagctgggattacaggcacctgccaccatgcctgactaattttttgtatttttagtagagacggggtttcaccatgttggccaggctggtctcgaactcctgacctcatgatccacctgcctcggcctcccaaagtgctgagattacaggcttgagccactgcacccggccctactggttgcccatttttatgggtgtttcttgattatatgctaaacaaagggtggattattcatgagtttcctgggacaggcatggataattcccagagctgaaggtttctcccctttttaaaccatatagggtaacttcctgacgttgccatggcatctrtaaactgtcatggctctggtgggagtgtaacagtgaggacaaccagaggtcactctcatcaccatcttggttttggtgggttttggctgacttctttgctgcaacctgcataaaaacattttgaatatgagaattgaagccaaggctttttcaccagagttctgccttttatgttggtaaatgggacaattttctcagggtggacaattcccttctaatggtctagctcccacccaggcctcctaggagcaaaaaagagatctacccttgaacatgaaggagattagattctcagctaccatcactcttctgaaaaaacagggaggagagggatcatgttcactcaccacttctagttctgtgacagtacccagtgacagcaaggaaaggccaccaaaccaccccstgtcttttattcatcatccccagggagcatcctgaccagaccaggactggctttggctgtgagagtcttctgcttcgaggctgcaccatcagaaacacckagatggctgttggcattgtcatctatgcaggtcattgtctgggtagtttcttttgtctgaattttcctttatccttccccctccaaatccatcttcagtcaatgggaaccaacaactgttcacagtaacttcccatttactcatgtaacttcccatttctcaactaagcaaacggaggctgggaatcacagcagttcactcactctacaggagacatgatgagattccaagttratatcacccatctgcactagatagggaaagggattcacactcaatcatcccggtggttttgtgctactaactaaagccagaatgaagtgtatcttcttaagcctgtggaataacctcaccaaacttaacaacttcccctttggagcctcaatttcctcatttgtacagtggggagaatatttgtatctgcctcatagagtgtttgtaaggatcaaattactcagcacatgaaaagcatccagcactgcctatagcaaagagagggctcagtgggttttagttgtttttgcagttatgtttttactattacctttatttattttatggctccatatatggaggcctatctctccttcccactttgatcctgctttccaatgaaaaaagataatagcagcgcttctcacaatgraatctaaagtcttggagggcaatcttggagctgctgtatctctagtacttaacaccagtgctcgtaggtacgcaacgcacctgttgttacatgaacacctgaagacttcagccacaacagaggaaacatggtctctctggagcatctacctttgctggaaaactccagaatgtgttttcttctgagtcttccactcactgggacactttggaatagtttgcttattgcttttttgtttggtttggtctccatagaaccccacttctgatggacatagaaaagcatttaaatatccatctaccataagatttactctttgggattgtcaaagaaaaacaggtctttttaaacataatgtcacgatttagctagctttccctaatttgggagagggggattatatttgtcagttcagatgacttatttcgaagatctttagcaatggagttcaacaccatctggtaaacctattaaaaatgaactctccagactctccagcaatctccactgtaccaaaaaagaaaatggtaatcataatcacatagatttagagctttgcttctctgcctgaacagaaataaagaagaaaccttgagtaggtgatgggagtggtatataaggtggcagatatggagtgttaaccatggctccagctagtcgggctgcctatgggtaaaatccattcatattctgcatgttcctgaacaggatggttgaactttcagtgcaagagggactaatagtttctaccttgtagctttataatgttagaatgagattatctgtgaaaagggcctaatacgacagttggaatacatcaggcccgcaaaactatgagaaagaagataccagttgtttttaacattattatctagagctggggttctcacctttggcaccattgacattttggcccatattattctttgtgacgggggctgtcctgtagggtatttagcagcatctctggcctctacccacaagatgcattarcaccccccaccaagtgagataacccaaatttctcaagacgttgccaaatgtcctctggggagtaaaatcactcctggtgagagcaatggtccagaattctcatttcacccttgacattatcaacgggtaaaacagggcctcagagtcaaaggcccaaaaaggccaaggtgagatttacagaagaaagaggtccaatgtagaggtgtgtgctcctcacagcamacactgagtcccaacttaccagaaactaatttagtactttgtgtgtattgatttattttcccacttcatacaccacaatcatctcccattttttagatgaggaattgaagtacaaagaggrtcactcacccaaagtcacatgcctcctgagttgaactctmtgcaacccaaggtcaagtatccacagagctgagctccgactctagagcccacactcttatccactgccccatacttcctccccttgaacccaactctttccaaaagaacagaggggtctcagaaggcaaggatcaggtgggtgaaggggatagtcccaggatccctgaatggagtgaggctgagaggcaggcagaaattctacaggcccaggagtactgctggaacccctgctcacaactgcagcaacttgagtctaattttaaaagcctagagtttttttgctcctactgttttgttgctactttaaatccacaagacaaccagctaaacagcataaaagccgtttgcttctggagctgatgtattggttttcttcaattttgcacagaaaatatgcaactgatgtgtttttcatttgactgctgaggagtatggcactgtagttaacattcagcagccccaaaggagaggctctgtctaaagacaaagtctcagtttgactcttagctcttaggtgtgtgatcttgggtcccaggggttggtgaaaggagaactacactggcaatctgaatcttgggttcacaatgtgactctgacattgacttattctttcactttgggcagatcctttttaccctctagccctcagcttcccctactggagaagaaggtgactgggtgagattggtagttttcaaactttgtcatcctttctttaaccaaaattgtatgcaaaacttcaacataggagtggagctgcccagggttagtgctggggtggggacctttggtccctactactcttgctcaggcaacaccaacaacttaggcatgaccaaagaaacaaatagggaaactgctggtcccaggcactgtcctaccacagggcttttgcatatacagttccccagcctaaaactctgctgccaactctgctttcccttcaggcctcccttcaatgtcatctccttggagcagctttccctgagcaggctctccaacaccacctcttttccaccttggccttttgtttactgtatattatttatttcataggacttattaataatgataattatcccttctgtcttcttgtatatcttcaatagaatgtgaaccctatgtcttgccattgtatcccactgctagcccataacaggtggaacagaacctttgtgcaaattaggaaaagacagcccttctttaagacagcttactatcatttgccagaactctgtccataataaacttataaatctttggcaactacagaatgagggctacgctctaaagttgtacagggcatagcctgtgcatgggagctctctcagtgcccaccacagtgtctggcatgcatgaaggggatgctcactgagtgcctgctggtaaattatgtgaggcccctacagctgttctcagcaaccttctgaggcggggcaagttcaggttaaagagtgaagcctctcttttatcttaagctcctgtgagaagagctgagggaatggtgtaagacataggcaaacaggaactaasggactgatttcctcattttctctcaaaggccatgagacgaaagccatgctgaacaacagtggcccccggtacaaacgcagcaagattgagcggcgcatgaatatagacatcttcttctgcattgggatcctcatcctcatgtgccttattggagctgtaggtatgggatgttctggaaagaacaaggacacagtaatcgatttatttgggcaagtttcttcagcttcctcatttataaagtagggctaataaaatgtaaagcctaccctgcccactttaacgggaygccaatgaaatgaaaatgcaagagaaaatctcctaaaagtagtatgtgttctttaactattcagaatatcatctgatatttatttggtcaagaaatatttactgaacacaggcactctcgtagcatggaatgaaaacaagacgaatcagactgtatttgtttcccattgctgctgtaaaacatgaacacacagtcatttagaacaacacaaatttattctgttacagctctggagatcagaagttcaaaatcaatttcagtaggttaaggcaggagtctcaaacccctgggccaagggccagtacctcctgtcagatcagtggtggcattagattctcacaggagtgcaaaacctattgtgaactgcacatgcaagggatctaggttgtgtgcttcttatgagaatcaaatgcttgatgatctgtygctgtctcccattatccctacatgggaccatatagttgcaaaaaaataagctcagggctcccactgattccactatggtaagttgtataattattttattatatattacaatgtaataatagaaataaagtgcactgtaaatataatgcacttgaatcatcctgaaacccctgaaaccatctccccctccccactgactgtggaaaaattgtcttccgcaaaaccagccactgataccaaaaatgttgcggaccactgcgttaaagtcagggcatcggcagttctggttcctcctagaggctctgaaggaaggctctattccttgtctttttccgtttctagtggctgcctatagtccttagtctgtggttccttcctcagtcttcagagtgcaccaccccaatctctgcctacattttcctctcctcatctgcagcagtagctctccctgccttttacaagacacctgtgattacatcattgggcccaccttcataatcgagatactcttcccatctcaagatctatgacctaatcctatctgcaaagccctttggccatataagatagtgtattcatagggccccaaggattaggatatatcctggggagagagggggtattattcaccttaccacagatattatgggagcagcaatgaggaaagtctttcttgaagaggtagctgctaaagctgattctcaagtggagtagacatttgccagaggaggaggatggcagagccaagtgtaggggctggatgkggcaggcagctgtgagcagaaagagagaggccactcttagccccaggaaaatcacaaagcacagaggcaggaaggaaaatggttttgtgcagaggagcagttggctgttggatgtggcaagagtaaggccaagaatggagaccaaagctgagccagtctgtggcccgagctgagtgaggagcaccatgagaggtggagacaggagtgatctggagccctttaagttgatcctcagagtgtagataaagaggggccaagactccccactgtctatggccttattctaaaaatgattctcaggatgctaaaggagatctcagaaagaaccagggacaatcaagagaaaaactcatgtcctgagtccagaaatatgcagacccgaaaccaatgagcagcagtggtgtttgctgtttacttgcattagtcagaaatcgtagccattgctgttgttagaaagatggtgtctgaaaggctgagagcttcataggggctcagagagactttgtgtgccactacagtgatgaagatgggattgagtcttgtgggtggcctggagttcccaggtatgtctaatagcactccacttgaggctggctcacagctgtaaggagagcacctgggggaggggaagcagggaaacaagaaagccattgtccccgctcccaccctctccccagcccatttggccacctgtgtccccaagatgctgcaggaactgttgtttctgcttcaggacaggtttttcagggcatatcagcgtgaaaaagacatttgagatcatctcactgtgtctccagaaaaagaaagttaatgattaaaaggtcacaggacaagawaaggcacagggaaaccagaatctgcttggcagattccccaaaacaataaagaaatgaagaaagttcatgaggagggtcagaattctattctgaattaacaactcatacacaggactctgatgatgcctaattaaagcacagccctacagaagatgaaagctctcaaatgagcaccattccacagttcttgaccacatgtttactttgattttgtaaaggtggtgtttcttctttcctcaccagaatactctgccctggccctcctgaccatccaacacgtgctggggctccaggaccccctcaagtcctcctcatccattcagccttctcgggcttttcccatacttgtcttattcccttaaaggccagtggcccttactctgtgccatgtgttttgtccttagtcatctgctttataacagtaccttcacataaatagcttcatgtctgtaagtttcctttcttctgttaggtatgacggcatttggcccaaactcctgggcaaggaagcatctttaggcattgcaacatcctctatgccttttattctctatacttcttggagctgagagcattttaaacattagattattctattttcacaataactctatagagaaggtattattactatttaacagacaagaacactgagatttagtgagctctataacaggtgctggatgcacttcaccttacataatcctcaggtaatgcgtgttgttatctcctttgcagataaggaaacagagttcagtctgtacctggtgctgttgctatgggctgtcacagcattctaggctctgctattgcacctctcatactgtatgtgatttgtccttttatgcctggctccctaatttggaagcaaactccacaatgacaagaattagtactaacttcttgaattaatcaatgtcagacagagggagggatgaatgggtaaacatagatggatggatggatgaatggatggatggataaatggatggatgggtaagtaggtgggtaggagggtggatggatggatggataaatgggtgagtatatggagtatatggatggatgaatggatgaatgggtgggtgggtagatggatgaatagatagatgaatggatagaaaaactgatgaatagaaggataaatggatggacagatggatggatggatggatggatagatggatagatgggtgagtagatgggtggatggatgggtgaatggatagaaagatggatggatggatggatggatggatggatggattcatggatggatggatggatggatagatggatggattgatggatgggtgggtgggtggatggagggattgatggatggatagatgggtgagtagatgggtggatggatgaatgaatagatgaatctatagaaaaatggatgaatggaaggatggatggataaatggaaggaaggaaggaagggtgggtatatgagtgggtggatggaagaattgatggatgggtggatggacgggtgagtagatgggtaggtggatggatggatgaatggatagataaatggatagaaaaattgattaatggcaggatggatgggtagatgggcattagatgggataagaaggggaagactaggggacaggtctcaaggctccctacccatgcacaaaagtgtgcaccacagaacaaaaaagaacaagtatttctttctctctttccagcccctatttaacaagacttaatcaaaacagaagtaatcctcatgccaatctcctcttgtaaaacaaacttaatgcctatcaarggattgaaatgtatacgaagaaccactttagagcaacatgaacacatgcacatacacaaacacacacacacacagagctacattgtatggaagaaggaggggtcctccaaagcacacccatttctaggaatgtgtcaagggctggtataattgaccaactttaggacttagtagagattcagcctcattcctggttttgcctcctctcaggtcacagcatctggaatgggacctttgaagaacaccctcccttcgatgtgccagatgccaatggcagcttccttcccagtgcccttgggggcttctacatgttcctcacaatgatcatcctgctccaggtaggaagccctccctaactaggggcccaataagatatgtggccaaaactcctayaactttgtaaaataaagaaaaaacagtgctggccactagaaagtacaaactggattgagatgaggagatggtcatcgctttcttgtgcgtctttgaaagtattcacattttgggtgatttaaggacccagccctgccttgtggaggggactctgcccccagataatagctggagggaaatatttattagcttttctatttaagatgacagcagtgacccatatgtgcctgtccctttgccagaacagataaaacgtgaatgatctaggaacaaaagaagataaagtagcacagtgagcgacagagaactctctgccccaacattgagagagagaaatcacgagttagtgttttaacatttgatacattgagaaggaaaagaacagaactggcccaatataggacagaagaaaaaagtgagacaaatgtgagacagtaattgatgaagagatgaattttaaaaccttcgtgtctctaagaaaatacaatcaatgaaaagatgagggaagttgtagttttccttttgtggagctccatctaccatttcttgtagtattggaggatgtttcattgccctcttattggtgattattttccattcatctttcagagtaatctattttaaatgcgaattaaatcatacccctcctatgtacagaatcctctcatggtttcatatccactcaaagtggaatccaaagtccttactgtggctgatgaagccctaagtgatctggaccctgactccctccctgacctcccctcgcagccctctccccctcctcactcacctgcaaggcctgctccctattactccccaaacgccacccccactgccaggcctgtgcctggctttctcctctgctcggaacactcctcccccagataacctcacaactcacaccctgacttcctcatatctctgttcaaaggtcatggtttacaagcatcccacccagccatcagtctaccctcttttctttattcttcctcatgcaacttaccaccactcatatatatttatttgtttgttctttgtcactggaaggcaagttcttcaaagccaggaattacgttctgttaactcccatttccaggacttagaacagcatcaaatgcacagcaagcacttggtaaatatgagatattgaatcagtggggagaaattaacaataggtctgaatacctataaaagcgggcagcagcccttggtggcacagagatctaaagggagtcagaggactctaaacagagatgctaagtctctctcactccctcccagctcagtcacagacaaccaatggtgactagacatccctggtcaaagaagacatacctgtttttcagattcccctaagaattccaagggatgcatgaggtcattgaccgttaatttcacagagagtctgtcctgtgagctgacctcaactttctatgaaatgcctttgctacctgctagtgaggatcccaagggagggaacctgcctggtttctgaatggtagaaactcatctcttttcaggtgctgatccccatctctttgtatgtctccattgagctggtgaagctcgggcaagtgttcttcttgagcaatgaccttgacctgtatgatgaagagaccgatttatccattcaatgtcgagccctcaacatcgcagaggacttgggccagatccagtacatcttctccgataagacggggaccctgacagagaacaagatggtgttccgacgttgcaccatcatgggcagcgagtattctcaccaagaaaatggtatagaagctcccaagggctccatccctctttctaaaaggaaataccctgctctcctaagaaacgaggagataaaagacattctcctggctctcttagaggctgtgtggcatttccacaagttgcttcctgtatccctgtggtcttccttgtcacagatcagggctgttccaattacttgtaaactttcatttgtttacaaaggttagaagttatcccatatgtggttccccttcagctgatctttgtctggtgccagacaaagcactttatgagacgagttttttatctgtcagcaatggattggagacatttcccaattgtgtgccagtcacacaaccaaggcttaggaatttctcaggccaccttacctgacatgtcagggcaggtctgtgtctaggtgcatggtcagatttaatacatccagaagatgtcttctattctaacagatctcttagcttgtcactgaggcaaagttttgatttaggagatagggctataaaatgcctggactgttaccttgcatggactgaatatgactcataaaactgatctgattccttcagccatcatctgcccaacttcgttcccctccccaccccccsacaacacacacacacactttctaagaaaagaaaagaaattcttttttttcaatactttaagttctgggatacatgtgcagaatgtgcaggtttgttacataggtatacatgtgtcatggtggtttgcagcacccaccaacccatcatctaccttaggtatttctcctaatgctatccctcccctagcccccaaccccccgatgggctccagtgtgtgatgttcccctccatgtccatgtgttctcattgttcaattcccacttatgagtgagaacatgcagtatttggttttctgttcttgtgttagtttgctgatggtttcctgttcatcygtgtccctgcaaaggacatgaactcatccttttttatggctgcataatattccatggtgtatatgtgccacattttctttatccagtctatcgctgatgggcactggggttggttccaagtctttgctattgtgaacagtgctgcaataaacttacatgtgcatgtgtctttagtagaatgatttataatcctttgggtatatacccagtaatgggattgctggtcaaatggtatttctggttctagatccttgaggaatctttgtcttccacaatggttgaactaatttgtactcccaccaacagtgtaaaagtattcctgtttctctacatcctcttcagcatctgttgtgtcctgacattttaatgatcactattctcactggygtgagatgttatctcattgtggttttgatttgcatttctctaatgaccagtaatgatgagctttttttcatatgtttgttggctgcataaatgtcttcttttgagaagtgtctgttcatatccttcacccattttttgaagaaaacaaactcttaagagagmagtattcattcttttgagtgtgagggatggagaaagagaaagatggagagagtattataagcagctgtatcccctttgccatggtgatagcagaccattcacatgggagcttctggtctctttgtaataataataagagccacattaccagtacttagagtatgctagttattttaacacattgtatcattaaatcttcaaaacatccctatgagttagaamcctaaaaaaaaaaaaaaaaaaaaaacctctgaggaaataaagtgacaggttatgtcaaagctcaaagtcacataactagtaggtagtccactagagtttgaatctgtgggacttagttttacccttctttctccagtcttggtagcccagatgccaatttttcagagtagcataggcccttcccatgctcttaccaccccccacacaaagtctaggttttccccaacatggtccagccgaggtacaactagtgcaataacaggactcctttcttgcagctaagcgactggagaccccaaaggagctggactcagatggtgaagagtggacccaataccaatgcctgtccttctcggctagatgggcccaggatccagcaactatgagaagccaaaaaggtgctcagcctctgaggaggagccagagtgcccgggtgcccatccagggccactaccggcaaaggtctatggggcaccgtgaaagctcacagcctcctgtggccttcagcagctccatagtaagtcctgacttttgcctttgaactgtaagtgttctgtgggaagagagggagggtgctctggaatgtgaaaaagaaaaaattgtacaaaccctgaagagctttcaaaatggtgcccttggttttgtacatactccacacatgtgttttgttggcatagacaattcttgttcattagaaatgttcaatgtttagaaatcagagattttatgtaagcatatagacttttttgcttctcttttaaaaattgaattataaaaattctccacactaagccagcatttcctcatggcaacaactggcttgggttgagaggtccctaactcttagactgggcatgccatcttcagctcatcacagccccccacccaccttctctatgtatcccgtcactgaggtggaggcaactgcatattcattatgcatgtttttaaaattatacagttaggagaaattagaaatatttgttatgcttatgtttctataagggagaaaaacaacagataagcctgtaaggcatgtgtgtttgaagaaaaatggaagaatatactttttggtgatcaaaaataagttttaaatagttatgaagcaaataatatctatgtcaagattacccagaccatttcattcccttaactaattcccttcggcccttatgggcattgctgtttgtggctttggtctggggctttctgcgtattgtcctttcacatttgatccactaggatagccatcagcaaacatccaggtagcaagcaaagaaaaccaagtttctccccagagatcacacagcattcttagaagtcaaggcaagaccagggcttctgcccactgtcctattcctctttcctttgcacacactctttctccggggaacataaaaacacatcatctggaatctctgcacttgcacaagaggccacagggagccccagcaatcttgaacaagagatacatactaacagatgggacccaaagggctaccatccctttattagaaaattagattataaaaatggtccttttggccaattttttcccagtcttttatttcccccatgaatacacacacacataaccacatatatttaacattttttgtaatcatggtacatatcaattgtagatgctgggattttctttaacttgatatcaaaaacattttccatattgctacttagtattcataaccaaggactgtgttttctgactgtgacaaagaagaaacactgtgagcctctgttctgggtcattactcatctaactttgggtgaggacaaagttgagttccctctcgggttattgtcatgcacggaaatgcaacattagcaaggataaggcaagaacagtgtgttaagacatatgaccttcataaatacacaagtgaaatgatccatagatgtcttcaggaagattttcatggttttttttattttcccaaacgagataataacaaggtgtgtatattgctacatccttcttaattttgcccccataaatgtaatgcacttccccgagttattttcttaaatatttgtaaaatgaccttagtgaattctcattaggcacagattctgtgtgtcgttggcatcttccagttctagataccacaggcatcccacatgcctgagtatgtctctcccagaaaatgagggggagaaaaaggaagctttcctttgtggatctcagttgggtcacatcaattcactgccccttgttcagtctgacaagtctcagcagcccagaaaaactgcatccctggtccaggcagtaaatcttggatgcagggcttttagctgatggccagtgagagggacacactaaccccagagctatctccagatcctagatgtcatcatcctgccctggctggcagtcccaaaggcaagttctgattaagttcattcaggagcagtaaggaaattgacacgagttaagttccaattcttgttgcctggtgaagggaagatggtgatatgttctttttatgaacagctaagtatactcttatgtaataaggtcacttaaaaatctggggttagtggaacaattgtatttttgagtagttttgaggaagggcactgggctaagagttaggaaatggaggttctggttttagttctgctactggcttgctgggtaaccttaagcaacatgttaaacctccttctatgtctctttcaccacctgaaaatactttacttacaattctcaccaggctgttctaaagatcaaataacataatgttttgctgacctgcaggctaacttccagctatgaattaggcacacgtggagtctaatgtgtcaggttttcatctcagctaccccatgtactagctctgtgactttggtgggcttactgaaatggaagcctcaacctacccattgttaaaatgaagamaattgttctggctcatgagtttattttgaggatttaattcttaaaattgtgtgttctagacagatacctaatggaagttttaaatgatctttctaaagggaagctgtctgccttgaacaaatgttcacatatctgatgtcataaagagaaaatggggagtttccatgaaatacarttgttgaactctctcccctgagatcctggtatatttggtcttgtgtgagtcctgagcacttatattttaatttctgataattctaaggagcagccaagatggggaccctccataagcaggccatcaccccaccaggaaagagtcttcacttggctcaaattggcactttctacagcttgggaggcatttgctgaagggagtgaagtatgcagcctttaaggactcttgtgctaacccatcaaatacatctagctggtgtcagatccttgaagccgtccctagagagctcctgtggcagccccaggtggctgtctcggtgcccacccccacccactcctgacagactctctgcacttgtccccttccacctgccttctgtgccttcctgcacctgcccatctggcacccaatctgttctgatcatctcttggaatcaccagttctttaccttcccttagtgaactcagtcaaaatttgcctctgaaacctccagggagcattctaccaccttctaaagaagccagttgttggcttccttggccctttgctctaaatcaaaaataacaatcgacaaaaacagcaacaacaaaagctgtttttttttcttttatgacaaaaaaaaacaagaaaccatcagtgattgtcacctaattgcctgcaataaaatctgtggctttaaggtgggggtaatatacttataaaaatggtgagttgagtcccaagccaatgtttaatagtactggcagatggaaaatgaaatgggttttttttctccttgtctgtacgcagccaagatttcagcagagagtctttgtgtaaaaatgccacttgcagaatgtttttcagtgccatcagaccacagaatatcttcctaatcataaaatttgtattggggccagttaggctcctccaaacttccacactgctttcctttgtggacatcccccccgccaccccacccttytgaagagaatgcaacagagaggagcgaaggaggtgtcattggacctctgcctcctttcactaatcttggtctgcctttctttctttggaagagatttatgcagcactcccagtctgctccaaatcggtgggacagcccacatacacacactcccactgtaaggttagataagagtcctgatttaattagccaagtacacagaatctttctggaagtgatgtgatcacacagggcaggaagcagtgaagcctatctgtactccccttgttccccagtgtctcaaatcggggtggggggacccagcctcagtgacactgttcacaagaggtgggaactgacaagatctggaaaactcccttcttgcttcaccactgagtttttttctttgggcttatgccccgtttgggaaaagcttcccctaacaatccatgtgttcctatttaagtgagcatttactaacattggactttcccagttcttgattcaaactaaatgtcattaaggccagagccttagacaggacaaaaccatcactgccctaaacagtgttagcctccagctccccagcaaccaggaaaatgttgccataatagtcatagcccacagggttacataattgaaaggaaccaaaagctgatggtggaaagtaagtgtccctccctcctctcttcccaccacctcaggcacaacaacgattagcagcttctgtgtgtccttcccaaaggtgcacagaaacagacaagtatggcatatacacaagcacatccttcacaagtggaagcataccgttcccactgtttaggactgtgcttttttaacctaatgaattttaaagaatatttcctatgtgtagacagacaggtagacattcaatagagagctgcctcatcttttattttttttaatgactgctagaattcgttggatggttgagccatcatctgtttatatatgtgtttgagtttctctacagtattcttagagcataattgctaaattggccagtatgtgcatttttttattctggttgattcttcccaagacrttgtaccagttgagacactcaccaacaacaaacagaagggcctgcttcttcccacctctgccagtgtctacatttctttagaagagcctttcatttattgggtcagtcaacaaacattcagtaagcatctactctgtggcatatactgtcctagagactagggacataaagtctaatagaacattgctcctgctttcaggattttacagctcaatgaaggggcaaaaggagcaccagtgactatgggacaatgctctctgggctgggatgtgtggttgcagaggtgctataggagcttagaagaggtgcagctatatcatactggggcatcaaggaagcttcctggaaaggttggcccctgggctgaattttgagacaggagtaaatattaactggaggaataaggagaccacctagtgaggagtggatgaggagtgcaggttgtgagaggagacaatctgtagaagcaagatggagaattgtagttcttcggagtagctggaatgaaaggtgcaatctgaggaggaggaggaggaaatagagacataagaggaactatgccatgaaggattttcttcaaagctcargaaccagggttcctgtttatttccttctctggattcctgtagcaacaaactgctatacctgaacttgggcgagttattattaaaactgaaagaagaatagcagagtagagtttggcctacttttcccaggcttcattgtgggaacacatcccagccagaaaggaatgaaaacagtagggttgtcatgtaacacagacccttgctactccaactgtggtcctcggagcagcagcatgaacaccacctgaaagtttgtcagaattgccaatgctcaggccccactcggagctgctgaattagaatctgcattttaatgagatccccagttgacatgtgtacatgttaaagtttgagaaatgttggcatagcgttaaagggtttagactttggcatcaggcagtaccgaatttaagtcccagcacattatctgcgattttatgacctgggacaagttacttaacttcaatgagcctcgcttgtttcataattaaagtggaatgatactaaccatatcagtgctcttaggatgattagataatggatgtgagcgcacttagcccagtgcctgactttgttatgctatgcattctcagtaagtgtaatctaatgataataggacccttgaggatatcgtttgagctcaaaaatcagcttcctcaaagggggtttgtatgcattttaggtggtctacaatggaaagaaatccaactagttgagtgtctgcctgccacaaagctcttacataaaaaactggtggccccacaaatgtatatttctttttcttccgagaaatagtctggacaatggtcagcaatgggtaaggacactgctttctttctaagtgctctaagtgccaagtttctaaatgttaatggtccacatgggaaaccagtgggctggagcaaaaggagccatgaagagccttgccctgtggcaacaagtctgtggtgactgggtaaaggttagctgacatctgttcctggcacctgcaggatgagccagggccttttacagcgaaggcctttgttttaatgcattgctacaagattggatgggaatatataaaagagtagttttaatgaacagacagcaggagttaatcagtggtgagctattgtggtatcctagaaaggagtcagttaacaaatattttgagtgcttaacaatccaccaggcatgagggacacatcagagacagtctctgccctcatagcacttacagactagtgggtaaatgaaaatggactaaataacttgaagcatgttaactgtgtcagcatttggaaatacataatgcatagcttggaacaaagcagtgtgttataagaggatgggagtcaggtggtatgaaaactgtcctagttctgaccctaaatcagtgtgtgatctcaagcagtttcctccttctgacactcaattttggcatcaggaaaataggggatttagctttgacatctccaagtttgttcctcaacttgggtacctgtggcagtaagatttaacagcatctcatttatgtaccctccccctaaaaaagaaatctattttctgaaaaaatgaaattttccataatcccttttatcactctcatggactatctgctgagccttaaggattagatatacaaacgcatctattgtgtttgagatgcccagacactaaagaccctgggtggtagcaagtctcraaggccacttctttcacatgcaggatcttgcctgatataggtgttaagattatgaattctagggtcagactaactgaaatcaactgaaagaattcctcccacttactgtgtgaccttgggcaagacaatcaacttccttgggcatcagtctcctcatcttaaatacagagacaattgggaggatgatggtactaaatagataatgttactgcagggatataacgaggccatggatgtactagaacataagaaacaccacatgaatacgagctgtcattactctgttgagaaataggtttggagttccttgagtggtgttggtgacttgatgacaaacactggatggtccctggaatctggttttagaagtttgcagagaaatattaataagagaacatactgtgaccacagaaatgaaaaaccttagactagcagttcaggagtctgagctctgattctggctttacactaactcactaggcgactttggtcaaatcagcctgtctctatgggttttagttaagtcgggattcatttcatctcaacttgggactataagaatctgatgaggttatataaatgacattgcttgggaaggtaagaagagtttcacaaatgtgagcgcctactaggaagactggagtcaaaggcagagagcatggataatatgtgtgtgcccttctcaggattttggaaataatgacaccacatggtatggatggttcacacaattgttttcagggcaatggaaggaaatgtaggtctgattcagttttattagccctcttgcttctgataagcagactttttttctggaagttgtcttcttacaatggtatgaacaagttggggtgtgactgtggactcctgaagagcacccagaatgaaggctggtattcttgaagagtgtgtgctccattcttgtggggtatgtctgagtttcctcccctctggctctcctgtgccagcagccctagggaggacagaatcagacctctgggagtcattgcatttggtagtcagaaaagtctgagggctcttttcccatgggttttttgtttttgtttttaaactctcaacttgggtaaagttcattggccctcagtcttcaccctgcacaaattaatcaagattccctcagtctatcattttcagccattgactgtcttctaaaccgtgatttagctgtgaactcagaacactgataggaatggtcttatgtgaaagcattgtgcaaaatggcttttgtcatatctaaccattgagagctggcatttgttgagcttctgcttcaaaaaagctgtagttagagctctaggaaatacagcctcatggaaaactcaacctctctatttttgaggctcttaccttatctctagagagattaaacaaggacataagaaaagtgaatttaaaatacaggccaaagcaagatgccagcagggagatagacaaaaccagacaccaccactgccattgccaccaccacctctgctctggttaagatctcactgcctgagagaagcttttctggcatcagatccctggggtaaaatagaggagccagagcaagagaaaataagccaacaaataacatataggtcaatatgtagtgaattccaaagggatggttcaagtggtaacttctasaaagatgtgaaaatctggaaatccatgggtcagatccagcccgtcctcttttttcttccaaagaagaataggaggaaaagaaaaaaaaaaataggtcatgcatcatctttgctttatcttgaaaaatcaagagacttggcaaactagaccagtattggagcattacactcagcagagcagtagctaccctttagatagtggtaggacttgctaggtctcatagctcccaccaccccataatgtcctctactctacattggcccaccttcctcattcactttacatgcctgactcctgtggacattctgagttaagaatctgctattgtggttcaggagaaagagacttcattgtgagctatataggatctcacggacaagcgggacttcccatggttattgaagtctaggtaggattttggtaggtagaagaggatttttcaagcaaagtgtgatcagaggmatacaggagtatacatccaagaggcagcaaacagaccaccaggctgagctgagggtccatgttgagaagcatgggaataaagagtgaaaatgcaaactgtgaaagaatctaaatgccaaataattgatcacgctaacaatggatatctcctgaaggttttttgaagtcaagaatgccaggaggaaatggagttttaagaagactgtgcaggtgatacataggaaggattagaaaaaaaaaggtgagaggcaacagtattagtttagaggctggtgcagaaattcaggattgaggggtagagggtctcagcatggctggaagcaacacaaatggtgggaagacactgagagtgaagaactgtcagcatctggtaatggatggacatgtggcactgagaggcaggaaggactcaaataagaattggcaatggccagacctgtgggagaggaaaacatgctggatgcaagactgcaatgaagctgcatcatcctttccccaggcatgtgaagattcttctggagtgggcttccttcccagaaaagactctcattctggcctttctcttccaggaaaaagatgtaactccagataaaaacctactgaccaaggttcgagatgctgccctgtggttggagaccttgtcagacagcagacctgccaaggcttccctctccaccacctcctccattgctgatttcttccttgccttaaccatctgcaactctgtcatggtgtccacaaccaccgagcccaggcagagggtaaggaccagcgatggctgggggaggagggtaaaggaggtagagragtagaaggcagggtaggggcgaggggagaagttctgatcagggagacatgaaatttgggtcctagcaacagtgtcatttcatcacagtgaaacctagaataggtctcttaccctccctgggtctgtttcctcatttttaaataaaatggaaaaagatacatatgagctttctgtgtagctttcaaactttgtctatgtgtctgcaggtagacattaagagttagtgattactgagcacttggctttatgccaggctccatacccagcactttacctgtattatcatttaatcctctcaacccagcaactctatgaggcaggaccttagatttaacaagcgaagaaatagtagctcagaaaactcaaggtaatgaaggacatatggctcataaatggcagaaccatctatgcaattccataatggtttctagtaatattgtgctatattgctctctgtttttatatacgggttaaaaataatactgtgtgtaatgttcttcccatggaaaaaaatgcagctgaatggtcatgtatgtgaagttatactctgaaatctactgaaggtggatttgccttcaatcttccacagactcttagccaatcacccctgtgagctgtgagtcactgagagaataattaggtggtacaacttgcaactatgaaaccaagacaagaagtttcacccaggcactaaaccacaacctcccttcattatgcccagattccaaaccaccctgaaaatcacttcagcactgaaaagtcagcatgttatcagaagtcttcaggaagtttttggaggcagaaagctttatcttaaaaattaattcatttttaagaggggaagaagtaccatttggggaaagacagtakgcacctcccaattttcaagttaatgtgggagcttcagctggctgggagcttcagctggcaggtagctcaagagcccagcctctggagtcgaggagacctgggtttgagttccaactctactccctacacactgggtratcatggccaatttatgtagactttttgtacctcaatgtcctcagccataagttgggttgatgatagcatcccacagaattattgggaggatgaaatgagataccgcactcaaagataaagcagaagcatttatagtgagagttcaggaaatgtgaacccttactatgagtttctgattctcatctccttttccttcctttctccacgctcacagtgggatgatcaaaagatagtggaaaatgaccattgtcaatgcttagaatttcagggctggaggaaaatatctggcttcacttattgcaaaagtaccttcatattccgcataagacaacttggtattatttccaacattgagagtaatattccactttccttctttggccacaaggtcaccatcaaaccctcaagcaaggctctggggacgtccctggagaagattcagcagctcttccagaagttgaagctattgagcctcagccagtcattctcatccactgcaccctctgacacagacctcggggagagcttaggggccaacgtggccaccacagactcggatgagagagatgatgcatctgtgtgcagtrgaggtgactccactgatgacggtggctacaggagcagcatgtgggaccagggcgacatcctggagtctgggtcaggcacttccttggaggaggcattggaggccccagccacagacctggccaggcctgagttctgttacgaggctgagagccctgatgaggccgccctggtgcacgctgcccatgcctacagcttcacactagtgtcccggacacctgagcaggtgactgtgcgcctgccccagggcacctgcctcaccttcagcctcctctgcaccctgggctttgactctgtcaggaagagaatgtctgtggttgtgaggcacccactgactggcgagattgttgtctacaccaagggtgctgactcggtcatcatggacctgctggaagacccagcctgcggtgagtcctgccttaccagggttccaggcacagagagttctatagtttaagaagcagtgtggaatggtaataagaagctcaagttgtastgtcacctggtatggcaggtcccaactggaatacagacctacaagatgttttcctcaaatatccttaaaacatgctgcattttacatctcctggacctagggaatcacagtgtccattagcatatttaaagactgtacagtcttgtagcagataaacatctttaacttcatcccagttttccaaactcatttaaacatggattatccacacagtcttttgcactagaacatccattatcttaccatggaacacattgtggtcctaactcttcattttggagaaaagcacactcaacttagaaagaaaagtgacttacaagaggtaacatggttaactagtgttaaatcccagacccaggtatcctgaattccaggtcagagcttgtttcatgctgccagaattctgcactgggcttggtgtactctgggaagcctcaggtgttcctctttattatccttttccccagcctcccccagatggattttcataaacgtgcactgagccagaaaaatgttccaaagtccctacatatcagtgtccaattttggaacagcatgaattagtgtgcagccgcttcctgattgctaacaaggagaagacagttatggggctatgattctcccaggatagtagattccagccaagcttcagaattgcccaggcagccctgtgcctcctgcattatcagccatggatcagggccaagaggtttatggggattgattagtgtgtagaatgggaagggagctaattagttctctttatycccagactctggcagacaagtgaattcagtacttctgagtcaagggagccacggcactctatccctcagcagccagtcatccaagctgccctggagatgtctctttatttgctcctcacctgattgaaaaatggattagagatgccttcaatagaagwcacacacacaatgttactataagaattgagaagcaaaactttgaaaggagggagaaaatracctcaggtttaataatatttatggtgtttaaatgttcaatttgatgctgaggttcctggcagcctwagcaagaaggtaaactccaaggcttacaagtaaaagacaaacaggtttaatctcaggagctggtgtctttaaaaataaaatattgtaaatagtgccgaatcaggcgatgcacaaatgaagactatgcttaaggcgccagcaacacctgaaaaatgagaaaataatctttgaaacaagttttatattatataaaaacagccttggagtagtatcatggaaaaatcagagttttgttggacttcattatacttttctgttaagaattacatttttaattttgcattatatacaaggatgggtgaggtatacaaattctgttcaatcttaggacctttaaaaatctcaatccagccctggtaaaaaatgattctgaagcctagctcagttttacaagcgactgataaatgatgtctgtggcagtttagataaaggaagtgctgatggcatcaatcccaccccacaccagccaaccttggctgaaaaattcttattatagaattagataaaggaactggaatttcaagagaaaaagacaaattacctctgacagaaacttatgtacaactttacaaaggggactttgagcaacacacatatttttcatactacattcataggaaatgcataaaagaatgttttctctaaacgtatttcttgcattgagagaaggcctagctcagctaaacaaatgaaatgaggaacttagctaatgagatccaggcttgtagatgtcttgggacctaayttgatataagacctcaagtagaagatagagaagatgataaatagagaacagtttccaaagtcagttggccatccagagatcaactaaaaacaccttaggtaacaataaagattcaaacttctagtcccctgattcagctgggctttaactggacctgagaatctcaattattaaattcccaggcggttctcatgcaaacagctgtttgggaacagtaccttagaccacctaccttccttacatagcactttactcagccaggcttttgatgaaaagatgtagagagcagacagcttaaggacyccctgcattatcttccagggcaacctgacagccaggagagctccttcaggtttctaaggtgggctgtaagggattccttctctaaagtatttgtagtctactacaggagattccagggtattggggatggggatccctgagcatttgtatgtggcctcatgcgggaaaatggctatttgacagtacctgacattaatatggaaaagaagctgagaaaaatccgagccyggacccaaaagcatctagacttgtatgcaagagatggcctgcgcacactatgcattgccaagaaggtaagaacaattcctycaagcgtgctttgaatatcattraatagctgaatggccttgaccctgcttctttttctttataaaagacccttagaggtggttgttttaacattttcaagattagctgttctgacttgccacaaaaacccaagacactgacaattttgtggaagccaaaatctgaagagctaggtcccatatcagtgtggctttgccatgccctgcttttcattatatgtgtaatgggtaacacacaactcatgacattttttcagttataattttgttttccaattatattttttaggtatgcattattttcctttaaatttggggaccttttatatggtcacataaaaatctagatttccggtttcttttaaaaatgtagaggatctggccaactgtgttttcattctagaatggcagcaatcagctacaaccaggaagaagttgattcctgtgatgagggatatgttcagctgtgttctgtggttggccacagtccctaccactctctacctctccctatcacattgcactcagcccagccatagttttgtagattacctaactcatgctttgcaagatctttgactttgcaacttctgcaaggcaggcaggcagtgagggctgcgaattgcagagtgtggacaccgaatgagtcacccaaaagcaaagctaatggggtgctatgatgggcatacatttctagatggctagacatgggttctcctgcataaatccccaggacttttcatgtcttttatggttcttaggtcagcattagagatcaggagtgcccactttaaagccagaaccacctgggtactagtcccaatctcactacttttagatgtgtgaccttgagcaatttcttcacttctgagttttatctgtaaaatggtgctaatcagccctccctcatgcagttgtcatggagattaactaaaataaccacatgtgcagcacctgggacagcaacaaatgcttactgctactctgaatcagtattacacccttaccacyattttctattaaagttatttgtgcatattttgcctcccctaatggactatgcattcctcaaaagcaaaaggcctacttgttccctttcgttttctctatagtgccatgcagagggactcasggaatatttgatgcttgaacaaaataatttttcattgctataagacaccatatgcatgtaatgtcaacaggagggtctaaaatgggactctgagggaagaagatgtggccactagctggattattccagctactgggcactccatgtgtatgacaccatgcctggtggagtgctctacaggctgctttctttccagcctcatttctgaactttctccgtctttcattcaaggaacagaaggaaggccaagttcattgccgttccacagccttaactcttgctcttgcccatgattgaccctctgtcattggatctcagcttgcaggtcattttgtcgaggaaacctaaacttcaaaagaaggcagccccctattcagttattcttctatcccatcacactttctcatatcactcatttactacctagcattccctgaaataactattttaaattatttatttggataatacccctcaccttccaccaccatataagcccaggcatgcagggaccttgyctgtccagatcatctccagtgatctgagcacaatagatttttagtgataatggaacacaaggataaatcttcattaatttacatatttaaaaaaaaaatctttgagaagaaagccccatctaattatgtagggaakttcaaacaggccaatasgagacccagcaggtgggaagagagaggaaattatcttgttggtccacccaagattgttaaggagmcttttcccatcccataggttgtaagcgaagaggacttccggagatgggccagtttccggcgtgaggctgaggcatccctcgacaamcgagatgagcttctcatggaaactgcacagcatctggagaatcaactcaccttacttggtagctaaaaataagtcattattataggaaaaaaggaatgcagccagttgagaagggagctcttggccccgattctgacactactaatatgtctccattagcagccttccctggggttcccttccaggtatttggcacaaatgggccatgccaatacccaacccagacaccacacacagcttcctgaggatgctctgggagcattcctgcattccctgctggaagaagcctctgagtttggctgcttttccaacagcacactcttcccttcattcaaatgtttgctaagcacctactatgtgccaagtgacatgctaggctttggggctgcaacaagggacaggagccaaaaagtctgccctcccagatcttggagtctagtgaggatactagatgatcgagcaagcaatttcaacagactggtgagagctgggctagcagatgggcctggtgggatggaagcacaaaaagtaggagatgccagcctagcacaggggtgagggagggtctaggaaggcagtgaactgaaagcaagaagagaagctggttaggcagaggaggaggacccaattgaaggcctggaggtcccgggctggggggaaacagagtggggagaaatgatggaaggcaggaaaggtcagcaggacccagattatgaagggtcatgtcaatcagctgctaaaggtttggagagggcagagggtgaaagcagagacagatctgtgctttacaaaaactgctgcttgctgcagcatggaagttagattgctatgctgagagagagaagagaagcacagagactgattaagagacaggctgtgcttctgttggaggaaaggcattgccaagaagcaaggggagctttattcaacaggattaatgtcctcacaccttgggagcaaaatctgggtaaacaatgcccaaacagcatgcactggccacgtggcaaaaagccttctttattcttggtggacagtgttgacctggggatgaggaccaagttctggacagagacacactcctctgagacttggcttctctggatgagtcacatgcctccagctgcccagccaaataggagttccaaggggaaagacccaaggtcactgtaaagtggtgatgctggcaagtgggatggctgacaagctgaggagggagaatggggttggggcatgcattagctccccacatccttcagcctttggtttcctatgtctcggctgcagaggcctctgcttgctacctcataaggtcccctttaaagctgaacacaagaactcacttgaacaggaaccagaggatggctgggccagacaactctatctgccagatgatgccaccagaaagtcatcccattcaggctcctgatccctttctcccttcccagaggtttcttttgtttcatgacagcactctaggctcagtctgtgagaggtgttcctccggttcttctgggtgaagagaacacacttatcagaacctgttggcttcccctagctggraaaggctttcacaaccttcctgtttcattttctctttcacacaaataaatgtgtttttcctcctctctccttcactctgcctcaccgtaataagtgagcttcttctcaccttccagactaacgcttataggggaagatgaggctcaagccatcactttttatggggttgtttacctgtgcatatggccctcagatgcaaaacaggcacatttcaggataatggggttctttgtctcccctcaagatggcttggagaggactgggctgagaagagaattccactttccaccgagaaattggcacaccactaaaaagctgtaatgccttcatgctgtctcaaaatatgaaataatcttttcaatatgcatccaacgtaaccactttgccaacctattgtcactctggattattaaaagaaacaaaatgccgtgctcctgcccagagtgaaatgggtagccattagtctgtgatctgaaatgaatctcaattgaaaagcagatttatttttgcttaatcacttagcaactattcaatatttggatatctattcatcagggctggtgcaaagcttgagatccttcaaaaattatggaatctgcatgtttaattcactccaagaatattatcaaaaatatgagtccctattaattctgctttgatcagttgcagggcaaagatttcagtctttccacttctattcctattgctgctaggccagtccaggctactgctgcctctcctctgcagtcctgcctggcctcctaagtagcttttagttctgaatctcatcctgcttttccaatctcaaacctattctctagaatgatattcttaaaagtcaaaactgattctatcactccccagcacaacacccttgaatarctttcactaccaccaaataaattgcaaatcctttgaggccctgacaaggctctgcccagtccagcacccctaagctccttttctggcctcatctctcaccttgctctgcctccatttctgcatcttcctctactgtagtctctgggacttcacacacactgatccctctacctggaattttcctcctctgccacctctttgcattatctcccaggtctcagtttaagtagcacttcctcagcataagcccaccctgattttccaggtgaagttcaggtctcctggtgtatattcgcatggtatcctgactttctttcattatatagctcagttataaattcttattcaatgaccattgaactcagaggtagagacctgctccatctagttcactgttatatcctgggtacacagcctagcacagtgatgctatccaataaacattgcctggcttcacatggctttgggggaattaagcaactactcttttacgataaatgtgaactctgttgtttttcatcactccaggagccactgggatcgaagaccggctgcaggaaggagttccagatacgattgccactctgcgggaggctgggatccagctctgggtcctgactggagataagcaggagacagcggtcaacattgcccattcctgcagactgttaaatcagaccgacactgtttataccatcaatacagagaatcaggtgaggtgattctctgtattgatatctgcagatatcaacgtgtagagcaacccctcaaccragaggacacakgcttctaggtgggatttgggtacaccagggaagcacccaacccccaacagatcactgaatcttggagtctagaggaccctggaagtcatccagcccaatatcctttatctcatccccacacatggctagctggtctcttttacattacttctggcactgcttgttagaaagttttacctctcccaaattctactattggtctagtctccccatttccccacagataaggaaactgaagactactggggctaagtctcttgctcaggtttaccctgcttatttctgataggtagaactaagtctagaactgagctagtgctatttacattctaccacactgtttgcttatggaaactcaactgtcggtttcttactatttaagactaacttatccattgaaaaagtcccaattaaattgaaattattcagagcttaaattttcagcatcaatttatatgtcaagctggtctgccacagagtaaaaacctgaaaggaataatgcatgaagccaatatgtttttatgggatgagaaagagaaagaatgaagcaaagatctaaaaatggcacttttcaactggaatagattacgggtggcagggagtgaggtttggagagaagactgggaaagctgaagaggcatattcaaagctataacaccgttttgattttagggggaagtatctgttttcacaattcaaattgcagaaggtaaagttccaccacatcttcttggctgatgaagatgggaagtgggcactgagattgtgtgctcctatcagaaggaagcaggggttggattccatggaggatattaaccagaagagcactctactgcaggggtgtgggcgtagggcccgtagggcacctacaccgaggacataccatggagaaaacgaaagaagacggaaaaaggaaaggagggagagaggacaccggactaaattttgtctgaggctgatgtagactacagtagaatgttggggaggtttatatttcatttttattccatgaagcaacaatatacacctcttttttaaaaataaaactagtgtagattatgaaaaatgccagaggacctttagatgaattggaaaaatcatttactttcctgtcaggtgcacagattattagattaaaccttaatgaattttcaaaatgaaaataagctcagggaaaacttgggctttaatattatgcttaggaaggaaagtaattttcagcttgcttgaatgcttgatccctgtgcctgcctgtcctgcttgtaatggaaattcggtttgcaatgattctttcactccaggtaattctagaaggagaacatctgcaaaccagtgaggcagccagccagagggagatcgagtgggcttccatgtgttctgctaaatgccatgcactcctgctcattggttaaacagccaaagctcctaaggaacagtcagccatactccacctttaattcagtcaatgacgaatctttctgtccagtatcttccaggacagtgcctgaatcctcagccatgcctacacccttgggctcactaaacctgtaagattagtcttttcatctctttacctgggatgaaaaataatatgttaagccagaaactggggaaatacattctaagtcttagacttatttaaaccctagtttaatgtagttacatattccgtggatatttcctccaaggtttttaatttgcctaattcactataaattgatttaggattattatctctttgctaggtgtattaaagcaataatcaagttatgggatcgacctagacctcagaattctcatccggaagatgagagaattactaactaatcactgaagtgttcatcagtcaaggaattttaaaaggaactaaagtattagataggaactaatactaaaaccactattattgctattgcaatattgttaataattaacaacctatattgaagttttaatatggctcaaacaccattcttcttgaacttctcttcatctgtaaaacagataaaaaatattaacttcacagattactggtaggattaaataagatcatagaagaaaactacttacttttagtacattacctatgctaattatctattggtacataacaaattactccaaaccttaggagctgaaacaacagacatttattatcttatggtttctgtggattacaagttcaggagcatcttagctgggcacccctagctcaaggtctcccttgaggttgcactcaagctgttggtcagggctgtgggctcatctgacggctcaacaggtgggtggttttggcatgggaaggagttctgcttccaaattcacctacatgactgttagcaggcctcagtttctcactctgtgggcctctccacaggactgctatacaacatggcagctggttttcctcagggctaatcatccaagagaaagtgagaaagagcaccaaattggaagccactgtctttttataacctaatatgggaggtgacatcccatcattttttgcagaattcccttcattagaaaggagtctctaggtctagaccacagtcaataaaaggagattacacaagggcatgaataccaggaagtggagatcactgggaaccaccatattagaggttcctaccacagtataggaggtatactaaatgttcagtgaatggtaattattgtatactttaaaagctggaaataagtaaattaagagatgatttaattttaaagcttatgtctccaatgacttgctttagtcatatattggaggaatttatataattggtgccagtcccagcttccaaaggactactttgatctctttccagataagtgcctctggtataagcatacactcctagaactgcttcctgtggcccgtctgggctctatgcatattctagtgcctgcaacactcaatttagcatcttaaaaggtagacacaggaataataaactatgtctttattctttccaaaataagttatgccagggcagggtgcagtgactcacgcctgtaatcccagcactttggaggccaaggcacgtggatcacttgaggtcaggagttcaagaccagcctggccaaaatggtgaaaccctgtctttactaaaaatataaaaattagccaggtgtggtggcgcatgctggtaatcccagttacttgggaggctgaggcatgaaaatcacttgaacccaggaggcagaggttgcagtgagctgagattatgccactgcactccagcctgggtgacagagtgagactctgcctcaaaaaaaaaaaaaataagttatggcagacatattcccccacacagaaatctctaaatctctagatcaatgttccccaaccctggcccttcagaactgctttcacagttttttccaaaatctgtatatgacttgtacttttttttacttaataatttgactcactttgaatattatttttagaagaaacttttagcacttcaataaatgtaaaatcatcctcccttgccatggatgaagaaacactgtaaaatgaagacctatgtgaagaaaacaatgctactaaaattgataatattaattcaagatggattaaagacttaaatgttagacctaaaaccataaaaaccctagaagaaaacctagacaatgctattcaggacaaaggcatgggcaaagacttcatgactaaaacaccaaaggcaatggcaacaaaagccaaaattaacaaataggatctaattaaattaaagagctcctgaacagcaaaagaaactaccatcagagtgaacaggcaacctacagaatgggagaaaatttttgcaatctacccatctgacaaagggctaatatccagaatctacaaagaacttaaagaaatttacaggaaaaaaatcaaacaaccccatcaaaaagtgggcaaaggatatgaacagacacttctcacaagaagacatttatgcagccaacaaacacatgaaaaaatgctcatcatcactggccatcagagaaatataaatcaaaaccacaatgagataccatcttaaaccagctagaatggagatcattaaaaagtcaggaaacaacaggtgctagagaggatgtggagaatttggaatgcttttacactatcggtgggcgtgtaaactagttcaaccattgtggaagacagtgcggcgattcctcaaggatctagaactagaaataccatttgacccagacatcccattactgggtatatacccaaaggattataaatcatgcgactataaagacatatgcatatatatgtttattgcggcactattcacaatagcagagacctggaaccaacccaaatgtccatcaatgatagactggattaagaaaatgtggcacatatacaccatggaatactatgcagccataaaaacagatgagttcacatcctttgtagcgacatggatgaagctggaaaccatcattctcagcaaactatcacaaggacagaaaaccaaacatcacatgttctcactcataggtgggaagtgaacaatgaaaacacttggacacagggtgggggaacatcagacaccggggcctgtcgtggggtggggggatggaggagggatagcattaggagaaatacctaatgtaaatgacgagttaatgggtgtagccaaccaacatggcacacgtatacatatgtaacaaacctgcacgttgtgcacatgtaccctagaacttaaagtataataaaaataaatgaattgataatgctgttttctgccatgattttattaaaaagtgatgttcagagaagttgatatcaagaataaatttgaatcaaaatatgactatttttgatataatcaaaagtaatggaagaaaaaattgaaaaaggaaatactttctcactatatttcaaggcaaacaccagaaaaaaattaataagtttatttccatcaataagacttttataaccrtagtccgttcaaaccaatgtgatcaatgcttcatgccacagttcttagcacccttcatggaatacaacaattgataaacacaggtacaatgtatttttttcagttaggaagccacagttcaagtagtaatgatcctgactccactactaagtttggatgatcttgggtgagttattaaagatctcatttcagtctcctcatctctaagatcaggaatacacaccctatctaccacrcaggaatgttctgaggaacaaaggggaacttaaatgacctgtgagaaatagaaagcaccataccagcatgacgtattgtcattatctaccattatattagtattatttattatcttatgccatccttgtrtctatctccatcttgctgagctactttcactcccattcacaagcagtgtcttctattttggctgttaatttggttccaaattaatattcctttgatattatgtcaaatattgcagagaaatataaaaattggagaatagcttgtaaataatctctatggtagtagagttttatgactatcttactaaagaataaactgaaattgttaacatgcatttccaaggttgcttacaaatactgtattattatgcttctttataggagacctgtgaatccatcctcaattgtgcattggaagagctaaagcaatttcgtgaactacagaagccagaccrcaagctctttggattccgcttaccttccaagacaccatccatcacctcagaagctgtggttccagaagctggattggtcatcgatgggaagacattgaatgccatcttccagggaaagctagagaagaagtttctggaattgacccagtattgtcggtccgtcctgtgctgccgctccacgccactccagaagagtatgatagtcaagctggtgcgagacaagttgcgcgtcatgaccctttccataggtacccatcatactgagatgcgggtggcactttggcagggatgatctgatgaaaggctggaccagaggtgggaggtcaggtctcaaagtcagaatgcttaggctgtgagtcattgtcttagagggagagagttcaaaatgacaatcaagatgcagcaactaggggatgaagtgggacagtgcatcaaagttcttgggactagcaagtcagctaaagataaatcagggtttagatggaggtcaaaaccaacaggggccttgaattcagtgaatccagatagctcaagaaatgttgccagtaattatattcagatcatcttaattctgggatacagatcattttccctttagtactttatgcatgccacaacttcaggtgtttagggatttgatattctgagtgttgatggctggtggggagattttaaagattggtactgtctcatgtttaatttgtgtgtttatttctaaataggaggccagcacaaagcatatcaccaatagatgctagcattggttgataaagaatttttcagagggggctaaactttaatcatgttgggacagagaaatgaaaactgcacttacttaacacctttcaggaacaaccaaacctggtttaaaagaatcttcgtgatcttctgttaccctcagccatatctcttattgtggccacctttctttctccaacagttgcctttccatgttccaacaaatgaaactgtttaccattctccatgggccttgtcctctctcacttctgggcctttgcacaagttatttcctctgtaaaacacttcttccaatcctacctaactttgctttcccctgggggctcccacagcacccagtacgcatagctcaaagcactgtcataccttctgtgatggcctcctcagtagaccatgagttcctcgagtagaaagatgtcagccttattcacttttggatcccctgcccagcacataccaagcatgtagtaaatattgccttctcttagggatgttcttacagatggtgccagcctctcctcctcctacacaggcatgggataagattttctttcctaacatttcaaatagaaaccctattaaacgtgatggttttgttcctggttttcaggtaagaacagtagagaataacaagagtggggcagaaagaaagcagagaacaaatttagcaacgacatcctacttttatgcctggaattgtcctcttcagaaattcagacacacacaaggcaatagcccaagaatgattttctctgaggtcagatattggcttcactcccatagcaacagaaacaaaaccagtgtggcgagaaatagcatggtttcacacctctacttctcctggctcactaacagaagagattaaaggttggatttgttttgcatggggaagatgaaaattatgcattgctatgcaatcaagaaatattttagaataaaggctacttatggcaaaacttttaagaccaataaatgtgtcatcagataactagaagaatcattctctccctcccattttatattctatatcataataatataaatttaattgtggcttattctgagaaactgctagaaaacatgtagggccaggaaaagaatgaaggcagcatagtctacaagaacaagggttggcaaactatggcctgcaggctgaatccaacccatggcatgtttttgtatggatactaagaattatttttctatttttcaatgtaaaatttataaaggattaatagtctttcagcaagaataactgttcaattttgcttcttggctcacaaagcctaaaatatttaccacctgaccctttacagaaaaagcactggggagagttcggcttctggggaaggcctcactgtatagagctatctgtggctacttaaatttaaatcgaatttcaccagcaaaatttccatagacacatgtggctcctggtttctatattggacagtgcagatatagaacgtttccctcatcatggaaagatcttgaacagtcttggtatagaaggagaccgtgtgtgtgtgtttrtgtgtgtgtgtgtgtctatgccttacctccagtttcctgaaacaactcagttcattgaatggaaactcagtgtgactaaatatatttcaaaaacatgaatcaatctcatttctctacactgagaaacaaaacaatatcatccctctccttggaaaccattgacaatttctgatgatttcactctccaaactgtccagttgtcttgatatggtatttcaagtttgaccgagggaagtgtgttggccctggaatctgaaagatatgagttccatttctcctgggtcctttctctagtggaattacccttgccaagtctctaagttgctcaaattctccatttgctcatcagtaaagttcattgtaacatttgtgaaggcatttttttgaaaactgcccaagtctcttgattaccattatatcyccaatacctaacactgtgcctagaaaaaaagacacttggtaagtcctatatttgctgaatggtaaagaaaatggtrggacttattttccaaagaagaaatgacatctctcaagctaagcactatagcaatgactttctatagcactagagtaatgttaaaaggattcaattgtatgtaactggggacactttagagctacctcattgtcactgagcagttggaccaaaaataaagacacgttatgacctctctttcaggtgatggagcaaatgatgtaagcatgattcaagctgctgatattggaattggaatatctggacaggaaggcatgcaggtattgttctctgcaactattcttctttctttggtccttagttgagatacaaggaaatatccagagtgttggagaaacttctccctgagaacttccacccacatccaaagttgcaatgccctccataagcaatgacagacataaggacatttgaaatcattttgcaaatgtacactttcgtagtgtcaaaattcagcttggaagaagcaaactaacttgactgctaaattttcccatttaaacagacattttgtgggttttgagccattaacaattgtatttccaccaccagtgtaaacatttggcactgcttaaatttgttgatgaggatagagagcattgactgggaagctgcagaatagttctgaaatgttaacttttgcgtatctcctatatgccagcaatctgttagaccaggggtatccaatcttctggcttccctgggccacaatggaagaagaattgtattgggctacacatagaacacactaactatagctgatgagctttaaaaaaattgcaaaaaaagtctcataattttgggccacattcaaagccatcctgggccacatgcgacctgcaggttggacaagcttgtgttagacacttcacatttaggatctcattgaattttaataatcatcacaccctgtaagggattgctattccattttttagatggggaaactgaggcacagggaattagaccaaagtttataccaggacttataaacaggcatgttcagtgttcatgtttttaaaagagtactataaactgtgccttgttctgagtaatcccaggggcagaagacatatttcagctccaggtaaaggaagagctgtcacttagctccatctgtgaatggagccaatggcctgactcagggggtggtgaaaggtgttcagaggattgtaaattgcttgaatggaagccccttctctctggttaaccatcacatccctagcacggtgcctgacacttactgggccacagtcaatgcttgctggataaacggatgaagagccagcctagaccactgatcccttctgatctgccctccttggattctagagaggtttggatttcccagaagggagggtggggtgtcagaatccaaaaagctacccaagagtgamcacaacaaggggtctttaggactctgctggccgtaggcctagaccaaagcaacgcccttgagagagtccctctggggcactggcagccatggatggaagctgatgtgtctgttctcacctctcaggctgtcatgtccagcgactttgccatcacccgctttaagcatctcaagaagttgctgctcgtgcatggccactggtgttactcgcgcctggccaggatggtggtgtactacctctacaagaacgtggtaagtagcctatggcgtcctctcacccagggctttggcaggccttgccacggggccagatctctccctagcagtgggcaaagcacctcagcataaaggaaggagtcaggctggcatagtgttagatcttgaaactgttccttaatagctctgtgaccttgagctagactcttcactttctatttttgtgaagttattgtgagaattggcaatgctgtatgaaaagcacctggcacacagagggcagcatgaatagctgcaagtgtagactctggagtcagacacgttgggtttaaatccagattcccatatgtgataatgtccccaaatctcagttttaccatctgtaaaatgggtggtaatagtacctttctcatatttgctatgaggactaaatgagaatttgcatataaagtgattagcgtatcgtaatcgtttataaagttagccttttttttattattgttgctgtcattactcttggagttaagtctcataaatgagattttcttattgtaacaaagaaggatttgaagagctagtctgaactgtatcagatttcctctgtatatagagccagctcagtgcaagagctataccccatgccttgggagagtgagggtgaaaagtacgtcacagaatataagcctggagcccatggcttcaacttgggacttgcatatcacttcagtgcccctgggctttctttcagggatttgctggagggcaggatactaaataaaatatctacttggcaaagatgtttgaggtgcagagtttgtctgggtagtcttacctgactccagcatgctgtatgaccttgaagaaactgaagctcacagagattaattaatcttttcatcaataatatggggaaactataattctgtgtcaagaggccttagtgtcagagctctgaaaaacatatagccctataaaaatacaaacaataagttgtgtattctaaaactatgttggtttgtcttgttgatgagggcctaaagcaaacacataccaactgaggtattaaaacggtcagaagactcttctttgaaaagccctttattaacaatgggaataggaagaagtcagaaccgtgctaggctaatggagggaacaaaagagtttttcattatctagttcaaaggcttttaataaaccccaagatttccaaacaatttgactcctctttgcataagtaaaaggggaggattaagaccaaggtgatggaagagaaacattagccaggtagtagctacaaaattgcaatttttcctcttgctccagtctttctttcagactctgacacagtcacctttgctcaggaatgactttctgtgcaaagttcaatgtatatgtagataaacagcatgacaaaaagtaatgtaaattcaatcaacttgatggtaatattatctcagcaagtctacgcaaacaagtcactccatctgacttgaaactcactttgagagtgaaagactgtttatttagaatccaaaatgctcctgtttaatttttttggcagctcaaggaataattcttttgaataagcacagcctcttctctgcattaaatttgtgaaataggaaagaaaacgtttccaagcagccacgctttcaaagcttaaatgatatttatttccagcccaatgccatgctcaaaattgcgatactaatgccgcattatctccctgttgcaattagaaggtggagaactatgacttccacatatgaaaccaatttcagaggggattaaaacctggcctgctctgaaatttgaacaatgaattaattaccgcactgtagcttcttgagagaaagagcaggcatccaatatcagcaatgctgccatggggttcaatgcactccctgcaaggtacaaagattccagttaggcagaagtgaaaaacaagcaagatcttaccagggcctcaggaggcaagaagcactctgtaacgctgaaactccaggatgggtgttagcatagagctaagattaactacattgattcaaataacaattgaatgtctgctgtatgtcgggaacagggctgagcaatgggtatagagcaggaatcaagccaatcatggcctgcgtgaggctgtctacatcaggtctcaggaagctttttcttcaaagagctagataataaatatttcagctttgcaggctgtatgtgtctagaaaagtctaatcgtataagccaaagataggactgagaaagtttagaggtagttaaaaagagaaagaactttgaaaattcagatgctgattgtaccactctctagctctgaatttgggcagggggcaacagtatgtcagaaccttggattcttcatctgtagagtgggcctaataatgttaatattattgttaatatcaacatgtgatatatcagtacaataacgtagtactactatagcaatattaaccttgcaaggttgttaggacaatctatagtgtgtattgcacatccaatgatgtactatatgctgatatactgatgtatatctcactcctggcacatatagaaggtcaaattttacaaatgatgttactactagtggcaatatgttaaaatagagagcccctccaaaataacattgacccagcagttcagaaataggagttacagcttgaacacaaacctgctgaatgatttcttgcaagacccttcacatctctgtgcctcagccccacataactgagaagttctagttctaactccaggaccagctgcttatatgtatgaccttggtcaaatcaccaaaccatatcgcaatatggtagacaataacagtgacccaacccacccacaagagaggagatcttgagtgagaaagagctttagaaaaaaatgaacaacatttaggcagattttgtcattcacccttctgagctgcatgaccattaggaaagtacagtgaagtcaaccttctcacgaggtcaccgtcctaccaggtgtcctgctcatggttcagtctttctattacccctttgtcagtgacatccctttctattaccactccactgccattcatatttcgcatgccattggtctaagtactactattcccagctgacagatgataaaatgctattcagaaagattaagtagtttgtccaaggtcacacagctagtaagtgacagaattggggattcaaaaccaggcctctctgcctccaaaatctgtacttttaaccatcatagtacaccaagtcctcaattaatgtcctcaataggttcctagaaaatgtgatgttgaattaagcaatgttattccggggcttgccatacatcattttgctttaagttgcagtttctaagaacctattggcaatgttaagtgaagacttactgtccactcccctttaaacaagttagtggaattcccttcaggtcctgaagaatgttagtagcaatagtagtagtagtaacagtggtagctactgctccgaggattagaattctctctcatccttacataaccctgtgtgttataaatgaggcaactgccactccagcagctcccagaggtcccaagcaggagctggtgacyggctgcacatggagccccactcacaaggccatgctctctgcctgcagtgctacgtcaacctgctcttctggtatcagttcttctgtggtttctccagctccaccatgattgattactggcagatgrtattcttcaatctcttctttacctccttgcctcctcttgtctttggagtccttgacaaagacatctctgcagaaacactcctggcattgcctgagctatacaagagtggccagaactctgaggtaaggagatcgggcagccaaagggaggtgacttcagcttcttactgacctctacctcccctctggaggcatcagagaaagagctgtatgctggggtcagaagcctgcattctgaccactgttccatcatttactttgagtaactcctctctcctttcctgaccmgtttcttacttgctattgagggtgttgggccagactagtgggtatttttaattttttttttattgttattatactttaagttttagggtacatgtacacaatgtacaggttaatttcatatgtatacatgtgccatgctggtgtgctgcacccattaactcgtcatttagcattaggtatatctcctaatgctatccctccctgctccccccaccccacaacagtccccagagtgtgatgttccccttcctgtgtccatgtgttctcattgttcaattcccacctatgagtgagaacatgtggtatttggttttttgtccttgcaatagtttactgagaatgatgatttccaatttcatccatgtccctacaaaagacatgaactcatcattttttatggctgcatagtattccatggtgtatatgtgccacattttcttaatccagtctatcattgttggacatttgggttggttccaagtctttgctattgtgaatagtgccgcaacaacatatgtgtgcatgtgtctttatagcagcatgatttatagtcctttgggtatatacccagtaatgggatggctgggtcaaatggtatttctagttctatatccctgaggaatccccacactgacttccacaatggttgaactagtttacagtcccaccaacagtgtaaaagtgttcctatttctccacatcctctccagcatctgttgtttcctgactttttaatgattgccattctaactggtgtgagatggtatctcattgtggttttgatttgcatttctctgatagccagtcatggtgagcattttttcatgttttttggctgcgtaaatgtcttcttttgagaagtatctgttcatgtcctttgcccactttttgatggggttgtttatttttttcttgtaaatttgtttgagttcattgtagattctgaatattagccctttgtcagatgagtaggttgcaaaaattttctcccattttgtaggttgcctgttcactctgatggtagtttcttttgctgtgcagaagctctttagtttaattagatcccatttgtcaattttggcttttgttgccattgcttttggtgttttagacatgaagtccttgtgcatgactatgtcctgaatggtaatgcctaggttttcttctagggtttttatggttttaggtctaacgtttaagtctttaatccatcttgaattaatttttgtataaggtgtaaggaagggatccagtttcagctttctacatatggctagccagttttcccagcaccatttattaaaaagggaatcctttccccattgctagtttttgtcaggtttgtcaaagatcagatagttgtagatatgcagcattatttctgagggctttgttctgttccattgatctatatctctgttttggtaccagtaccatgctgttttggttactgtagccttgtagtatagtttgaggtcaggtagtgtggtgcctccagctttgttcttttggcttaggattgacttggcaatgcaggctcttttttggctccatatgaacttgaaagtagtttttttccaattctgtgaagaaagtcattggtagcttgatggggatggcattgaatctataaattaccttgggcagtatggccattttcacaatattgattcttcctacccatgagcatggaatgttcttccacttctttgtatcctcttttatttcattgagcagtggtttgtagttctctttgaagaggtccttcacgtcccttgtaagttggattcctaggtattttattctctttgaagcaattgtgagtgggagttcattcacgatttggctctctgtttgtctgttattggtgtataggaatgcttgtgattttcgcacattgattttgtatcctgagactttgctgaagttgcttatcagcttaaggagattttgggctgagacaatggggttttctagatatacaatcatgtcatctgcaaacagggacaatttgacttcctmttttcctaattgaataccctttatttccttctcctgcctaattgccctggccagaacttccaacactatgttgaataggagtggtgagagagggcatccctgtcttgtgccagttttcaaagggaatgcttccagtttttgcccattcagtatgatattggctgtgggtttgtcatagatagctcttattattttgagatacgtcccatcaatacctaatttattgagagtttttagcatgaagcattgttgaatttcgtcaaaggccttttctgcatctattgggataatcacgtggtttttgtctttggttctgtttatatgctggattacatttattgatttgagtatattgaaccagccttgcatcccagggatgaggccaacttgatcatggtggataagttttttgatgtgctgctgggttttgtttgccagtattttattgaggatttttgcatcaatgttcatcaaggatattggtctaaaattctcttttttggttgtgtctctgcccggctttggtatcaggatgatgctggcctcataaaatgagttagggaggattccctctttttctattgattggaatagtttcagaaggaatggtaccacttccttcttgtacctctggtagaattcggctgtgaatccatctggtcctggactctttttggttggtaagctattgattattgccacaatttcagagcctgttattggtctattcagagattcaacttcttcctggtttagtcttgggagggtgtatgtgtcgaggaatttatccatttcttctagattttctagttgtatttgcatagaggtgtttgtagtattttctgatggtagtttgtatttctgtgggatcggtggtgatatcccctttatccttttttattgcatctatttgattcttctctctttttttctttattaatcttgctagcagtctctcaattttgttgatcttttcaaaaaaccagctcctggattcattgattttttgaagggttttttgtgtctctctttccttcagttctgctctgatcttagttatttcttgccttctgctagcttttgaatgtgtttgctcttgcttctctagttcttttaattgtgatgttagggtgtcaattttagatctttcctgctttctcttgtgggcatttagtgctataaatttccctctacacactgctttaaatgtgtcccagagattctggtatgttgtgtctttgttctcattggtttcaaagaacatctttatttctgccttcatttcattatgtacccagtagtcattcaggagcaggttgttcagtttccatgtagttgagtggttttgagtgagattcttaatcctgagttctagtttgattgcactgtgctctgagagacagtttgctataatttctgttcttttacatttgctgaggagtgctttacttccaactatgtggtcagttttggaataagtgtgatgtggtgctgagaagaatgtatattcttgatttggagtggagagacctgtagatgtctattaggtctgcttggtgcagagctgagttcaattcctggatatccttgttaactttctgtctcattgatctgtctaatgttgacagtagggtgttaaagtctcccactattattgtgcgggagtctaagtctctttgtaggtcactcaggacttgctttatgaatctgggtgctcctgtattgggtgcatatatatttaggatagttagttagctcttcttgttgaattgatccctttaccattatgtaatggccttctttgtctcttttgatctttgttggtttaaagtctgttttatcagagactaggattgcaacccctgcctttttttgttttccatttgcttggtagatcttcctccatccttttattttgagcctatgtgtgtctctgcacatgagatgggtttcctgaatacagcacactgatgggtcttgactctttatccaatttgccagtctgtgtcttttaattggagcatttagtccatttacatttaaagttaatattgttatgtttgaatttgatcctgtcattatgatgttagctggttattttgcttgttagttgatgcagtttcttcctagcctcgatggtctttacaatttggcgtgattttgcagtggctggtactggttgttcctttccatgtttagtgcttccttcaggagctcttttagggcaggcctggtggtgacaaaatctctcagcatttgtctgtctgtaacggattttatttctccttcacttatgaagcttagtttggctggatatgaaattctgagttgaaaattcttttctttaagaatgttgaatattggcccccactctcttctggcttgtggagtttctgctgagagatcagctgttagtctgatgggcttccctttgtgggtaacctgacctttctctctggctgcccttgacattttttccttcatttcaactttggtgaatctgacaattatgtgtcttggagttgctcttctcgaggactatctttgtggcattctctgtatttcctgaatctgaatgttgacctgccttgctagattggggaagttctcctggataatatcctgcagagtgttttccagcttagttccattctttctccccgtcactttcaggtacaccaatcagacgtagatttggtcttttcacatagtcccatatttcttggaggctttgtttgtttctttttattcttttttctctaaacttcccttctcacttcatttcattcatttcaagttgatcacatcggctcctgaggcttctgcattcttcacgtagttctcgagccttggctttcagctccatcagctcctttaagcacttctctgtattagttattctagttctacattcatctaaattttttccaaagtttttaacttctttgcctttggtttgaatttcctcctgtagctcggagtagtttgattgaagccttccctcaactcgtcaaagtcattctctgtccagctttgttccattgctggtgaggaactacgttcctttggaggaggagaggcgctctgctttttagagtttccagtttttctgctctgttttttccccatctttgtggttttmtctacttttggtctttgatgatggtgatgtacagatgggtttttgctgtggatgtcctttctatttgttagttttccttctaacagacaggatcctcagctgcaggtctgttggagtttgctagaggtccaatccagaccctgtttgcctgggtaacagcagcagtggctgcagaacagcagatttttgtgaactgcgaatgctgctgtctgattgttcctctggaagttttgtctcagagaagtacccggccatgtgaggtgtcagtctgcgcctactgaggggrtgcctcccagttaggctgctcaggggtcaggggtcacggacccacttgaggaggcagtctgcccattctcagatctccagctgcgtgctgggagaaccactgctctcttcaaagctgtcagacagggacatttaagtctgcagaggttactgctgtctttttgttcatctgtggcctgcccccagaggtggagcctacagaggcaggcaggcctccttgagctgtggtgggctccacccagttcgagcttcccagctgytttatttacctaagcaagcatgggcaatggcaggcgcccctcccccagcctcgctgctgccttgcagtttgatctcagactgctgtgctagcaatcagcgagactccatgggcgtaggaccctccaagccatgtgcaggatataatctcctggtgcgccattttttaagcctgttggaaaagcacagtattagggtgggagtgacccgattttccaggtgccatctgtcacccctttctttgactaggaaggggaactccctgaccccttgtgcttcccgaatgaggcartgcctcgccctgctttggctcgtgcatggtgcactgcacccactgtcctgtgcccactgtctggcactccctagtgagatgaacccggtacctcagatggaaatgcagaaatcacccgtcttctgtgtcgctcatgctgggagctgtagaccagagctgttcctatttggccatcttggctgccccaattatttcttaattatatcacacattaatatgggactgccctagtcgaaggggaagagccatgcagaaggatcctatacctttcagccatcccctccaggctctgagatgcatctatagaacccccaaagcccagtttgagaacccttgggatttatagctactttgcttttcattgggtaaggtatacaatggttctatttcatattagggaaggcaaaacttagaactcaaaattacatgtgctttagaatttgctggtatcaaatagactaaggcaggcctgagaagccatcaggtggcatcctaggaggcccagagaggccacactgcagccctgaatgatttggagaagtcagacagcatgcactcccagcaccagcaagaagctggatcgagggagctctgggaagagggactttgcaatgccagagagtgtcttgcacctggaggaaagaagggcaaagccaagtgtagtatttgagatctggcaattatttatagactaacagcaagcccagttgttagcccaaagccaagaggagagagcaacacagaaacccaagcagtccagacgaagggggcatggtgagagtgcatgttcaccttgggctcttctaagtttacccttcccatcaaagtgctgactgcrtrgcaaattccttgagtatctaaaagttaagcaagacccaaaaactgtaaagatttcacttttcctggggaaggcacaaagattratgcctgagaaggcttgtttctggagccgctgatgcctgagaagccttgtttctggagctgttgaacttcagaaacttgggggaacctgtgattcgagctacgattgagatctctcagatgccacttagaaactttagaatctttacacttgccaggtttgtagcaacagtagcaaaagaactaatgattgataacaaygaataactgagtacttggctaggcactaaggcctgagtacttactaggtaggcacaattgcatttactcctcttgaaccccaaggagataggctgtgttatttttgcccacatttaatggaagaagaaactagttctccgcacagtttagtaattttcacaaggtcacacagttgaactgaagtctgtcacccccaagtctacactcctaattactccattctactaccacaaatacaagaggcattgtatgcgtctggttgtctgtcgcagccacatgcaagaaagttgcttgcaaagaatagaggcttgctataagggtgataattattggtgtgttctctcctggcagtgctataacctgtcgactttctggatttctatggtggatgcattctaccagagcctcatctgtttctttatcccttacctggtaagtcatgtagtcccattctaaccacataaattgcagagaagaactggtcctttttatrtaaagttccagaccagtagtgtccttctggacactttagagcagaggctcaaacaggtagcctgcaggttacatccaacmcaaggtgtttgaaaagtcagaacactacccaaacattttgatttctgctggcwcttgaaaaactgaaagctatatttatactgggtcattttttccctcatagcaaaaatctggacttgactttgcagctgggctcaccttgtgagcatgttctccagtttgccttagtctctaccactcccctttgtcttacatctggctatctttactcattaactgtttcctacttgaacactgaaggtatttgaatttactacccttgatttttatatacacttgtgctttgaaggtcaaggaagctagccttcagaggcagcaagttccgataatgagatactacattatctgaaaaaagtagcaagaatgcagatagcaagggataccagcccaatctcagtttgattcctcagtttaaatagtgagaatttaggtagcaaacaatatatgtcttcttcctggacacacggaacaggatgggaagcaattgccaccaggtaaacactgttgcttatccaacctctgggctcatattctttcataattagcaagatgatggagttaggggaggcagggatcttgtgttttgcttgaatttcctggcttacaataccctccctggccaggtctttgcttggctttcctgctatatcttttgcccttgaatatgctcaacagacctacaatgtaggactctggagttctacaaaccgtctgtgttcaccctccgttctgaccttttctggaactgcatttaccctctctttccaagtgattaactcctcttattctggtctcagctaatatatcctcttctgtgttcccagggtaccttgtacttgcctctattatagcacgtacttccttaaattgtaccacatccgcactgcctaatagactaaactcattgtaggcaaacacagaagtatcctcagctgttagcattgtgtctgatgggctctcaaygaattctgtcttcattcattccacaatggtttcacaatccccatcttggcttactcctgcaaacaccatttctaaattagtcctatcaattcctttcttaccttgacctgttcctcggatcagtaccacacagatggcagctgggtacctccttctccattgacaactgccttcattgatgctttataatcactgtgtcaaagccaaagttagtccacagacatacctgacaatgcctgtctgttcctcctcygcaggcctataagggctctgatatagatgtctttacctttgggacaccaatcaacaccatctccctcaccacaatccttttgcaccaggcaatggaaatgaagacatgggtaagtgtcccagagcccctttggcttcaaaactgtgctcctgcccattgactatactcaaatttctgaattgtttcattctgtgttatsaatccactcaataaatacatactaagctcctaccctatgtcctacctgtacagggatgaaaggggtgaaaaagataaaattctggaatcaacttgcttttcatctagccaggatgttaaaactaacatatattaaaacaatgagacaattagttgcaaaaatagataattgataaaaagttcaggggtatggccaggcatggtggctcacacctgtaatcccagcactttgggaggccgaggtggacagatcacctgaggtcaggaattcgagaccagcctggccaagatggtgaaatcccgtctctactaaaaataaaaaaattagttgggtgtggtagcaggcgcctgtggtcacagctactcgggaggctgaggcaggaaaattgcttgaacatgggaggcggaggttgcactgagccaagatcatgccaccacactccagcctgggtgacagagtgagactccatctcaaaaaacaaaaaacaaaaacagttcaggcrtgtttcagagacaaggaaaacactgaccatacatacctgaggctgtgttagggaggaattctccccatttaattttagggtgaatgattagaaacgtgcctccaggtaaccatatctcaagcatatccaaatrtcacattttgatatctaagaaggcaatgtcacctttctgattagatttttctagtcagtaataactataaaaactaatagcttacaattctgtctataccaagtgtctctctayatgattagcrtgtattatttaacctctagagccctttgtgttaggtgtttttatattcccattttacagatttagaaatatggyagatgcaataaggtttaacttgcccccaagcagtttaagatagaagcaagttttgaaccctggcagtttaacgtgagcctttaacatccatgctaatagtgtaagtagataagattgaatggtacacagggaacactttacagaaagatgtgtccttagccaagttcagatggctttctggaagtacaagcattaaaaatttggaaaatagccccaagtaggctcagcatgttcctacattctgcaatggaactctccaccccagcctcccaccaccactatcacaagctaaagcaggccataaccagctgggcagtggctgataagagccactcaaaggtagttttggatcatggagttctcattttgaaaaccccctctcctattcaacatagtattgaagttctggccagggcaatcaagcacgagaaagaaataaagggtattcaaatagaaagagagaaagtaaaattgtctgtttacagatgacatgattgtrtatttagaaaaccccattgtcagggcaggtgcggcggctcacacctgtaatcctagtgctttgggaggctgaggtgggcagatcacaaggtgagaagttcaagaccagcctggccaacatggtgaaaccccatctctactaaaaatacaaaaattagctaggcatgatggcatgtgcccgtaatcccagctactcaggagctcaggaggctgaagcagaattgcttmaactgagacctgggagacagaggttgcagtgagccgagatcatgccattgcactccagcctgggctatggagcaggactccatctcaaaagaaaaaataaaagattatctaagcccaaaaactccttaagctgatgagcaacttcagcaaagtcttaggatagaaaatcaatgtacaaaaatcataagcattcctatacaccaacaatagacaaacagagcaccaaatcatgaatgtacttccaatcacaattgctacaaagagaataaaatacctaggaatacagctaacaatggaagtgaaggacctcttaaaggagaactacaaaccactggtcaaggaaataaaagaggacacaaacaaatggaaaaacattccatgctcatggataggaagaatcaatattgtgaaaatggccatactgcccaaagtaatttatagaatcaatgctattcccaaactaccatcaacattattcacagaattagaaaaatctactttaaatttcatatgaaaccaaaaatgagctcatatacccaagaaaatcctaagtaaaaagaacaaaactggaggcatcatgctacctgacttcaaactatactacaaggctacaataaccaamacagacatatacaccaatggaacagagcagagacctcaaataacaccacacacctacaaccatctgatcttcaacaaaccagacaaaaactagcaatggggamaagattccctatttaataaatggtactgggaaaactggttagccatatgcaggatcccttccttacaccttatacaaaattaacaccttatacaaaaattaactcaagatggattaaagacttaaacataagacccaaaaccataaaagccctagaagaaaacctaggcaataccattcaggacataggcacaggcaaagatttcatgacgaaaacaccaaaagcaattgcaacaaaaatgaaaatttactaaactaaagagcttctgcacatcaaaagaaagtatcatcagagtgaaaaggcaatctacagaatgggagaaaatttttgtaatctaaccatctgacaaagggctaatatctagaatctacaaggaacttacacaaatttacaagaaaaacaccatcaaaaagtgggcaaaggatatgaacacatacttctcaaaagatgacatttatgtgaccaacaaacatgaaaaaaagctcaacatcactgatcattagagaaatgcaaatcaaaaccataatgagataccatctcacgccagtcagaatgacgattattaaaaagtgaagaaacagtagatggcgaggcagtggagaaataggaacgcttttacactgttggtgggaatgtaaattagttcaaccattgtggaagacagtgtggttattcctcaaggatctagaaccagaaataccatttgacccagcaatcccattactggggatgtacccaaagcattataattcattctactataaagacacatgcatacaaacatttattgcagcactatttacaatagcaaagacatggaaccaacccaaatacccaatgacagattggataaagaaaatgtggtacacacacacactatagaatactatgcagccataaaaaagaatgaggtcatgtcttttgcagggacatagatgaagctggaagccattatcctcagcaaactaacacaggaacagaaaaccaaacaccacatgttctcactgataagtgggagttcaacaatgagaacacatggacacagggaggggaacaacacacactggggactgtcaggaggtggggaacaagcggagggagagcattaggacaaatacctaatgcatgcagggcttaaaacctagatgacaggttgatagatgcagcaaaccaccatggcacatgtatacctatgtaacaaacttgcacgttctgtacatgtatcccggaacttaaagtaaaataaaaattttttaaaatcctgctccaatgtgtaccaatgacagaacaaagtgataagacaaaaaaaggcatagccaggcttaagtacaggacaaatttcttcatgggccagaaacaccagaagaggctgcaatacaatgaggaagggaagaagaagagaaggcactgggaaggctcaaactgcagactttctgggaactgggacaggacacagatcatggcaatggggactctggctcctgcggggtagggcagactggaaccccatctactgctgggtctaaaattctcctactcaagaaagaaatctaaagaaaagataacaatggcaagctgtttggaggtatagtttttggttttttgtttgttttttggagatgaagtctcgctctgtcatccaggccagagtgcagtggcgccatcttggctcattgcacctccgcctcctgggttcaaaagattcttctgcctcagcctcctcagtagctgggactatggcgcgtgccaccatgcccagctaattttttgtaattttagtagagacagggtttcaatatgttagccaagatggtctcaatctcctgacctcgtgatccgcccgtctcagcctcccaagaaggtatagttttatcagaagctgtttgatactagaaaccaccaagctaatgaattcttgaaaataaaatattgtcattgaaattaaaactacaatttgtaggatctgctctagatcagacactggcaaaaaataaactgccaaattgaaatgtagtttygggagcttatccagaatgatacacaaatatgaaaaataagaggaaatggtggctagaacaaatggcttcagcctctctaaataggaatatcaggaggaaaaaagaatgatggagaagcaatatttgaagaaattgtcattgagaatgaaaatttatcaaaaatctggatgtattgcctggatatatcataattaaattgtataatataaaacatacagaggcagcccttaagtctgccagagactatagacaaattacttgaaaaggaacagctatgctggtgaccaaacaataaaagccaggagacaatggagtaattgtcttcaaaaaacctgaaggagaaaataaaactagaaaagctacactattaagagtaaggcaagataaatcctattttcaaataaactctataaggttaactacccataggccctcacaaaaaaaggaacatacttctgcaagaatgtaaacaaaagctaaaactataagacacaacataaagaagggctattcaataggtaggtaatttatgctaaagccttcatagtggatagaagaataaaaatacacatttaactatacatttttccataagagttcagtttttttagtatcttaagattaatcactaaaagggaaaaagaaaaaaatctagaaaactgtcaattctgcagatgtaggaaagatgaaaaaatgagagcaggggtggctggcgagatggccaaataggaacagctccagcctgcagttcctagcaagatcaacacagaaggtgggtgatttccgcatttccaactgaggtacccagctcatctcactgggagtgcttagacagtggttgcagcccacagagagcgagccaaagtagggtggggcattgcctcacccggaaagcacaaggggttggggaactgcctgccctagccaagggaagccatgaggagccatgaggaacagtctactctggcccagatactacacttttcccacagtcttcccaatccacagaccaggagattctctcgggtgcctacaccacgagggccctgggtttcaatcacaaagctgggtggccgtttgggcagacatggagatagctgcaggagttttgttttttttttccataccccagtggtgcctggaatgccaaagagatagaactgttcactcccctggaaagggggctgaagccagggagccaagtggtctagttcagcagatcccacccccatggagcccagtaagctaagatccactggcttgaaattctcactgcgagcacagcagtctgaagttgacctggtacactccagcttggttgggagaggggtgtccaccattactgaggcttcagtaggtggtattcccctcacagtgtaaacaaagccaccaggaaattcgaactggacagagcccactgcagcacttcaaagcttctgtagccagactgcctgtctagattcctcctctctgggtggggcatctctgcaagaaaagcagcaactccagtcagaggcttatagataaaactcccctctccctgggacagagcacctcggggtaggggtggctgtaggcacagcttcagcagacttaaacgttcctgacggccagctctgaagcacagcgctcgagctctgctaagggacagactgcctcctccagtgggtccctgacccctgtgcttcctgattgggagacacctcatacaggaaagctctggctggcatctggtgggtgcccctctgggatgaagcttccagaagaaggaacaggcagcaatctttgctgttctgcagcctctgctggtgatatccaggcaaacagggtctggagtggacctccagcaaactccagcagacaggcctgactgttagaaggaaactaacaaacagaaaggaatagcatcaacatcaacaaaaaaaagcccatacagaaaccccatctgaagttcactaacatcaaagacccgaaggtagataaatccatgaagatgagaaaaaaacagcacaaaaaggctgaaaattccaaaaaccagaatgccacttctcctccaaaagatcacaactcctcaccagcaagggaacaaaactggatggagaatgagtttgatgaattgacagaagtaggcttcagaaggtgggtaataacaaacacctccaagctaaaggagcatgttctaatgcaatgcaaggaagctaagaaccttgaaaaaagattagagggatggctaactaaaacaaccagtttagagaagaacataaatgacctaatggagctgacaaacacagtatgggaactttgtgaagcatacacaagtatcaatagctgaatcgatcaagtggaagaaaggatatcagagattgaagataaacttaatgagaaagcttgaagacaagattagagaaaaaagaatggaaaggaatgaacaaagcctccaagaaatatggaactatgtgaaaagaccaaacctatatttgattggtgtacctgaaagtgatggggagaatggaaccaacttggaaaacactcttcaggatgttatccaggagaacttctccaacctagcaagacaggccaagacacataattgtcagattcaccaaggttgaaatgaaggaaaaaatactaagggcaaccagagagaaaggtcgggttccccacaaagagaagtccatcagactaacagcagatatctctgtaaaaatcctacaagccaggagrgagtgaggaccaatattcaacattcttaaagaattttcaacccagaatttcatatccagccaaactaagcttcataagcaaaggagaaataaaatcctttacgacaagcaaatgatgagagattttgtcaccaccaggcctaccttacaagagctcctgaaggaagcactaagtatggaaaggaaaaatcagtagcagccactgcaaaaacataccaaattataaagaccattgacactatgaagaaactgcatcaactaatgggcaaaataaccagttaacatcatgacaggatcaaattcacacataacaatattaaccttaaatgtaagtgggctaaatgctccaattaaaagacacagactggcaaattggataaagagtcaagacccattggtgtgctgtattctggacacccatgtcacatatgcaaagacacacataggctcaaaataaagggatggaggaatacttaccaagcaaatggaaaacaaaaaaaagcagggttgcaatcctagtctctgataaaacagactttaaaccaacaaagatcaaaaaagacaaagaagggcattacataatggtaaagggatcaatgcaacaggaagggctaactatcctaaatatatatgcaccaaatacagggcacccagattcataaatcaagttcttagagacctacaaagagacttagactcccatacaataataatgggaggctttrataccccactgtcaatagtagacagatcaacaagacagaaaattaacaaggatattcaggacttgaactcagctctggactaagcagacctaatagacatctacagaactctacaccccaaatcaacagaatatacattcttctcagcaccacatcacacttattctaaaattgaccacataattggaagtaaaacactcgtcagcaaatacaaaagaatggaaatcataacaaacagtctctcagaccacagcacaatcaaattagaactcggcattaagaaactcacttgaaactgaacaactrcatggaaactgaacaacctgctcctgaatgaccactgggtaaataatgaaattaaggcagaaataaagaagttctttgaaaccartgagaacgaagacacaaygtaccagaatctctggacacagctaaagcagtgtttagagggacgtttatagcactaaatgcccagaggagaaagtgggaaagatctaaaatcaacaccctaacatcacaattaaaagaactagagaagcaagagcaaacaaattcaaaagctagcagaagacaagaaataactaagatcagagcagaactgaaggagatagaaacacaaaaaacccttcaaaaacaaaaaatcaatgaatccaggaactagtgttttgaaaagattaacaaaatagaccactagccagactaatgagagaaaaatcaaatagacagaataaaaaatgataaagaggatatcaccactgatcccacagaaatacaaactaccatcagagaatactataaacacctctacacaaatgtactggaaaatcaagaagaaatggataaattcctggacacatacactctcccaagactaaaccaggaagaagtcaaacccctgaacagaccaataacaagttctgaaattgaggcagtaattaatagcctaccaaccaaagaaagcccaggaccagacggattcacagccgaattctaccagaggtacaaagaggagctgatatcatttcttctgaaactattccaaacaataaaaaaagagggactcctccctaactcattttatgaagccagcatcatcctgatacaaaaacctggcaaagacacaacaaaagaaaatttcaggccaatatccctgttaaacattgatgcaaaaatcctaaataaaatactggcaaaccaaatccagcagcacatcaaaaagcttatccacccacaatcaagtcagcttcatccctgggatgcaaggctggttcaacatacawaataaatgtaatccatcacataaacagaaccaatgacaaacaccacacaattacctcaatagatgcagaaaaggccttcgataaaattcacctcttaatgctaaaaactctcaataaattaggtattgatggaacgtatctcaaaataataagagctatttatgacaaacccatagccaatatcatactgaatgggcaaaagctggaaacattccccttgaaaaccgacagaaaacaaggatgccaccctctctcaccactcctattcaacatagtatcggaagttctggccagggcaatcaggcaagagaaagaaataaagggtattcaaataggagaagaggaagtcaaattgtctctgtttgcagataacatgattgtatatctagaaaaccccattgtctcagccccaaatcttaagctgataagcaacttcagcaaagtcttgggatacaaaatcaatgtacaaaaatcacaagcattcctatacaccaataatagacaaacagccaaatcatgagtgaactctcccattcacaattgctacaaagacaataaaatacctaggaatacagctaacaagggaagtgaargacatcttcaaggagaactagaaaccactggtcaaagaaataagagaggacacaaacaaatgcaaaaacattccatgctcatggataggaagaatcaatattgtgaaaatggccatactgcccaaattaatttatagattcaatgctatccccatcaagctaccactgactttctccacagaactggaaaaatctactttaaatttcatatggaaccaaaacaacccatatagacaagacaatgctaagcaaaaaacacaaagctggaggcctcatgctgcttgacttcaaactatgctacaaggctacagtaaccaaaacagcatggtactggtaccaaaacagatatataaaccaacagaacagaacagaggcctcagaaatcacatcacacatctacaaccatctgatctttgacaactctgacagaaacaagcaatggggaaaggattccctatttaataaatggtgttgggaaaactggctagccatatgcagaaaacaaactggaccccttccttacaccttatacaaaaattcactcaagatggattaatgacttaaatgtaagacctaaaaccataaaaaccctagaagaaaacctaggcaataccattcaggacataggcatgggcaaagacttcatgactaaaacaccaaaagcaatggcaacaagagccaaaattgaaaatgggatctaattaaagagcttctgcacagcaaaagaaactattatcagaatgaacaggcaacctacaggatggcagaaaatttttgcaatctatccatctgacaaagggctaatatccacaatctacaaggaacttaaatttacaagaaaaagcaatcccatcaaaaagtacacaaaggacatgaacagatacttctcaaaagaagacatttatgtggccaacaaacatatgaaaaaagctcatcatcactggtcattagagaaatgcaaatcaaaaccacaatgaaataccatctcactccagttagaatggcgatcattaaaacgtcaggaaacaacagatgatggagaggatgtggagaaaacttttacactgttggtgggagtgtaaattagttcaaccattgtggaagacagtgtggcgattcctcaaggatctagaaccagaaataccatttgatccagccatcccattactgggtatatacccaaagcattataaatcattctactataaagacacatgcacacacgtttattgcagctctgttcacaatagcaaagacttggaaccaacccaaatgcccaccaatgatagactggataaagaaaatgtggcatatatatatataccatggaatactatgcaaccataaaaaaaggatgagttgtcctttgaagggacatggatgaagctggaaaccatcattctcaggaaactaacacaggaacagaaaaccaaaaatactgcatgttctcactcataagtgagagttgaacaatgagaacacatggacacagggagggcaacatcacacacttgggcctgtcagatggtgctaggggagggatagcattaggagaaatacctaatgtagatggtttgatggatgcagcaaaccaccatggcacgtgtatgcctacgtaacaaacctgcacattctgcacatgtagcccagaacttaaagtataatgaaaaaatgcattttaattttaaaaataaaatgagagcaaagaaaatgatggcaaacaaaaaatgcaaaatgagatgtttaactaaattgaaatatatcagtactcatagttgatgcaagtagattaaattcttcctttaaaaaaattacagactggatttttttcatccagcaaaaataagaaatggacaaattcacaatcatagtttgatattttcatacaactatataagaaactggtatagatcaaatagatgaaaaaatagaaggggtatagaaacttttaataaattgtttgacctaatatataaaactttgctcaaaacagataacattttttcaaacatacacaaaccagttaccagagagacaattctaaatcacaaaggaatttgaaagaaaaaaaaaatcataaagtttatgttctctgacaagttatttaaattagaaaccagcaataaacaggtagccacataaaacctaacaarcttagaaatttcaaaatgtacttctaaacaacttatgaaataaagagtaagtcatgatggaaattctaaataccttttgctcaatgtctataaaaatactagcacttttaatggcaaaatccacgattacttatgtaccaacctaaggattagaaatcccctaggacgcggtgctctccagccccagaaaatcaataatgatctgtcttaagtaggagcagtaattcctttaccttcagcagtgattggtccagggtgggcacatgatccagctcttagccaatgagaggtcaagggatacctgtttttttaattattattatcaataagatagagtcatgaggtaaaagccttttgtcccaccttttccttcctgcttttgtcagtgccctgtgaccaaatgatgtgtggcactgcagccactgttttgggcaatgagtttaaggacaaagccaactactgctagagatcccagagcagaaagatgaaaagagcctggattyttggacacactgagcccctggctgccaaccttaagatgttttgctataaaagatgatatttyttytttgattaagctgctgtcaggcacactgtcacttgcagttgaaaatgtaacaaatgccatcacattcccaatgccatattcctcagattaccttcagagaaggaagctaaagctagcaaacccttgaaggtacagggatcagcattccagctgaggtgtttggacttttcctgggagggaaatgtgttcagaagatcctcctatctccaatgtgccaacatctacctatgatacttacctctcctttgcttcacatcctaccatggttccccattgctcttaggacagagtccaaactcctcacttacgaacctgtaatatctgggtcctgctggccccctggcatcaccagtgatgcttcctacttcatacttagaccccagccagaccaagctacttttagttctcaaataccctattcttgcttctaggcctctgcatttgctaatttctctcccatttcctctggctctctyctcatccttcaggcctcatctcaaatgttgtctcctccaagaggccttccttggtgtctaggctggattctgtaaccccttggggctcccattgtgtcttgtgatttctcttattaaacacttactgaactggattgtgattgttttcataattgctctgcactatgctgcttccagctccctttcctaacttctggccctgattaccaaatgtgagcttaggctcatggccagattcttggctgtagactcaaagayaactgcttcccatagacccctccatcacttttttgcagtcacgtctgtagttggatgtgcttggtttctcaatttggtgacttttatcctttaagtccttttctgggcttcactttctcactcctctcacaattatgggaggtctagtccctgtagtaaatctcttatcctagacactcacagtaactcttctcccctgactgatacacaatccagagcagacactgtctcctggttttggagatggagacatgacccagaaccccatccaaacaattctaccmgaccccattcacagtgattggttcaggcatgtacatatgacccagtcctggccaatgagatcctgccttaggatttttgttggaaagcaggagcagtctttcygctgtggttgctgagccagttgtttggaagcctggagcaactggcaatttcttgccrtaatgtagaaaggactactggagaatgagaccaacagagaggaaagcaggatgaagaaagggagaggtgcagattccatgggacattgctgagtgcctgcatccagctttgcctgaagctaatcctacctctaggcttattatagctcaattcagtcatagttggttttttgtaccatctagtcaaaagagcctggccaatgtgtgaacaataactatctgttaartaaatgaatctcaaattgactgtggctatttaggggtttttttttatttgtttaatccattgttttctttttagaagaaaaaaagaatttagtgggttgttgttatatgaaaaatgaatcctagatagaatcctaggaggggattttaatcatcatttaatccagtgctttttttaattacagatatggaaattgaggctcaaagagggtatctaaattgccaggatcacatggccaggtagagaatgtataatctgaatatgctcataaggaaacatcagacaaatacaaaatgagcattattctttctttaaacaaaaaggtggtaggtagggtgagagtattccagtatttttcaaaaatgtcactgccataaaaaaccaaaggctacgaaatagcccagattaaaggagactaaggagacatgaaaactaaatgtaatatttgaccctaaactggattctgtgctgaagggaaaaaaaacacaccattaggacattattggatcaattaacaaaatatgaatgtaaaaaaattttagctatgttaaattaattttagcaatgttaagtttggtaaaatttaccaaaatccagtcaagatcactcagcaagcctgaataagccaaatsctatccccaaaaacattagacccaaaggatttaaagtttgatcaaacttgtaaagaacagktaatctctattatatcaattttttcatggaataaaaaaatagaaaaagataagtgtcttagtcagtttatgctattgcaacagaacacctgagactgggtaatttacaaagaatagaaatatatttctcatagctytaggggctgataastctaagaccaaagcaccagcaggttcagagtctggtgagcactgctccctgcttcaaatggtgtcctcttgctgcatctttgggaagggcacaaaaaaaaaaaaaaaaagatgaatgctgtgtcctcacaaggcaaaaagagatgaaacaaacactgtgtcctcacatggtgaaagggcaaaaaaagcactaggatgcttccatcatcctcttttataagggcatctaattcattcatgaaggaagatctttcatgacttaatcacttccaaaaggcccctcctcttaatactatcacagtgggtattaggttccaacatatgagtttagagggggcacatacatttaaaccacagcaataagcaatttgtttttcatggctataataactgatatcaaaatgggcatgggcagttcaaggaaagaaaattacagaccaatctcactaacattagatgtagaaaaaaaattttttttgagatagaatctcactcttgtcacccaggcttcagtgcagtggcgcaatctgggctcactgcaacctccgcctccgggttcaagtgattctcctgcctcaccctcccaagcagctgggattatacacacacaccaccaagcccagctaatattttgtatttgtagtagagacaaggtttcatcatgtttcccaggcttgtcttgaactcctcctgacctcaagtgatccacccaccatggcctcccaaagtgctgggattacaggcgtgagccaccgcacccagccagatgtagaaaattctaaataaaatagggacaagtcattttgggagtgtgttaaagatgttaaagcataaccaaggaacttccctatcctgttagtagatcataaactctgaagagttatttgaaaacagctagaggaatktaaagtactcatttttttggcacaattctaagtacatacctcagaaacactyttgcacacatatatgtggagacatgtacaggaatgttacatcgttcttaatagccaaaagggggcctaaatattcatcgatcagaaaaataagttgcggcctgttcataccatgtaatagttaaaatgaacctactagagctatgtctttcaacatagataaaattttaaagcagtggtccccaacctttttggcacsagggaccacagaagacaatttttccatagaattgaggggtggaggtggtttggaatgaaactgttccacctcagatcatcaggcatttgagtctcataaggagcatgcarcctagatccctcacatccacagttcacaatagagttctcgtgctcctatgagaatctaatgtcaccactaatctgacaggagttggagctcaggcagtaatgctcactcaccagccactcatctcctgctgtgcagcmcagttcctaatgggctatggactggtactagtccatggcccaggagctggggacccctcttctttaaagtataaaagcaagcgaaaaaagctgcagaattgtctgcgtcttctcaggctgtcataacaaataccatagactgggtggcttaaataacagattyatttctcatggttctggaggctagaagcccaagatcagtgcagcagctgattcagcatctggttcaggccctcttccttcctggacagctgccttccagctatattatcactcacatggctgaatgaaagagagaaggatcaaatctctcatgtcttttcttataagggcactaatcacattcatgggggctccccctaatcaccttcaaaaggccccacatcaaaatgctatcacattggagattagggtttaaacattactaacttgggagtaggaggacataaacattcagcccatactagaaggatacatatatgataaagcaaaaaagcatccataaacatgggtaaacatgtacacgtgtatgaaacgtgtcagactgatacacactgaatttgtgttcaagatgaaagaggtcatttgcaagagatatacacttgctttaattgtatctgtaagacttaatctttccataaaatctgaagtaaatataaggttaaaaccgatgaagctgaatgttgggtgtatgaggtttattgtctataagcatgaaatatttcacagcaatttaattacacttttaaaaactagtccaagatattttccaaaaggaattctcctctctatgactctcttaatcattagattttttaaaaccattcaaaagatttaatgtcctgaaagatttttaatcagaactcaacattatattaaatgagtggtgagactaaagattctgtattctgattgaacactcagtcctctttctcaaagcactgaagccatctgctttaaaagagaaaaagtactcttttagcactattaagccacctaatctatcttcagactaggtaccctcaatagttactggtgatttctggtgatttggggaaaggagtcagctactaaaataattatgaaaaataatgcttcccttttgaaagtacttgaagcaggaagagaatctatttcttccctggatagaaatataacaagaattttaagagctttgacagtttcagtccccattaaagcaattgaaaaagttagctaattgctttcttcttcaggaaacggcgctaggttatttagatcacatccctcactgagaacaacaaaaaatactggataactttaaaaaaggggaaaaaaaaaaactctttaaaagcatgagcaagctgacaagaaagcaatgaccaaacctcagggaaaaggagatgctagagaaacaaattgagccaatgcttttcttaagggtattggcaactatcccaaaaatgaacttttgttttggcagacttgattgagcaaaagtttcagaaatcaatacctaggctcctaagttaggagtctaagagacaacattaaaataggatcccaaaggctgtgacttcaaggtaaggatatactcagaagtacacccaattatactccctccccagctgggactgcaaagatttttttcctctgtgctgaagagagcagaaagaaatcagcaccaatttgccctggggaaattgtgaccacagactggcctcaggtacatatgtagcccaggttcatgtyacctgggtgagccaaactttcacctatgaattgagcttaaagtacctcaagattagcagtgcccaacgattgcaaaatacaaacacacacacacatgcatatgcagatgtacacaattcttttctagagaaagttacctttattctaagcctcaagttgtgtctaactttkagcacaataagcatattcaaaaataatgaacctcataaaagaatgagtccatgagtgaaaaaccaaatatcagaaacaaatattttagaaactggaattatcaaatataaattaaaggaaaatctatgtttactatgtctaaagaaacaaagaataagctttaaaatatctgcagggattggtaaactatataaagcaacctagcagatttgaaaaatcaatagaaaatttagaaataaagactacaataactataagtttcaatggttggcttaatagaaaattagatatagctaagggaagaattattgaattggtcaaaagaagtatttggactataaaacaggaaaagtaatgaaaattatagaagcaatattaagaaaatagaatgatattttaagtggtctgacaaacatttaatcagagtctcagaaagaaatgagagagggaatgaaatataggcaatctttgaaaagactgtgatgagaattttgcagaagtgatgaaagattccagctcagcaaaacccaagcaagataaataaaaagaaattcatacttactctgtcatagaaaactatagatcaaaaagacaaaaaaaagttataaaagcaagcaggctttaagagataaagatttccttctaaggaagaacaagtggagattaataacttcttaatagcaataatggaagccagaagacagtggaatgccatattaaacacattgaaggaaaatagctgcctaacaagaattccatattcatcaaaagacaaatttcaagaacaatgaaataaagcatcagagagcatatcactgtcagactcccaaaaaggacattttacaggatgcacttaaaaagatacctcgggtggagggtccaaggaatggaggcgtgagaagtgataaacatgtgagtagatcttagtgaatactgaccatacaaacaataatgccagtgagttgagtgattttaaaagatgacagaattaaaacagcagcaaaacatattagccaggagggatgtaaagagagttaaagtgctctaaatctcgtgtgtaattcaggaggatggaaaactagttgtaagctttagactgcagtaagtttgcttgtttagactgcagtacatttgcttgtttagactgcagtatatttgcttgtttagacttattgagtaatcactaaaagaatagtcccaaaattatacaaaatagtcaatatgtttaaaagaacaatagaatgactatagttaacattagccrattgtgtatttcaaaatagctagaagagaatcatttgaatattcctagaataaagaaaatatttaaagtcatggatgtcatgattaccctaattatatatgaatataccaaattatyacatgtaccctgaaaatatatacatctagtatcaatttttaaaattaaataaaaataaaagacaaggatgggaaaagaaaagcacaaaacaggcaggacaaaatacratcaaaaaacagaatactgcgctgctttgaaaatgaataaactactgccatgtggaaaaaatgggctcatcacacaaacataatattgagggaaaaaaaacaaaaagtcatacgaaacatgattctatttatccatttaaaaacaggctatgttggaaaacctagataggtggtaaacctacaaaggatagcatagaaattatcaccaaaagcaggggtgagacagaatagggtcttctggggtatgtgtgttcaattctacatggcagcaatctggtgtttgctttataatgatagattaagctgcacacttttttgaattttgtgtgttttgcatttcaaaaatagtttgaaacaaagttaatcaagtagtttgatcaccctgcctcctaatctcagctataccttcaacagtgtttgcttatttccctccacagaccattttccacggagtcgtgctcctcggcagcttcctgatgtactttctggtatccctcctgtacaatgccacctgcgtcatctgcaacagccccaccaatccctattgggtgatggaaggccagctctcaaaccccactttctacctcgtctgctttctcacaccagttgttgctcttctcccaaggtttgagcactagggctgtgtttctttcctaaaattaccaatctccctttaataagccatttttataacccaagagtcaggagtttgacttctgctggcatccttgaggctamtgtttcagaaacagagagatgggacagaaagaacaatgaatgacaaaggaggcaaataacatggactgtggtcccaggttagccacaaagtagcaaagtcaccaaatcagtgtgacctcagttgtgacatctataaaatgggagtatcaattcctaccctcctgccttacaaattttttgtgtagtaaggaattattttgagaagctctatggtcctttattgtattagtccaggaatcttatactcaaatgcctacagggacaggccagcaagttcagcaagccagatggagtacagatattggaagaaagagcttctcagcttctatcatggccacaaggaaagatcaagtcaaacattccagagcttcagcattttcccagaaattcaaattgtgcaygaaattgccagtgtttaaatactattcaaatttgtttaaacacacaccttccatacaagacctgcattagacaaataatccatgcccagggactatgtcagatatttccaggttaaaccctctgcagtaaatgtgccttttccagaaaaatagcaacagcaactataaatgccttgccttgccttgccttggagctcactcttgacataggctctcccatctagcctctcattttgtttttgccatgagctaagtgttgggcagagctatggttctagtaccccactcatgggacagctgaagtaccaagagggaccagaatgtgttcacaggcctaccacagatcatagtcagagctaggttctcccaactcaaaggccagtgttctattcygcagcccactctctctagtcagagcagtgaacttgatgatgatgttcccataggaaagacttagcctctctccatctcaccacgctgaacatcrcaatcaagccattttatcattttaagcgatagcaaatagacaattatacaaaactttttatcccaaaattagagacctatcaacaggccttacttcctttaataagtttggtggtttgcttaacctagtttctcttgtccctaggttctcttgcccctaggttctcttctaactttatgttctctccataaaaagcaatcactatcatggatttaaaaatttttagcagacgactcttcaccataaattccccccagacctctcttatgaattccagacacatctttctagctacctattcatcacctctactgggcatattaagtctgaggaaactgggagacatttctaattgaattcatcattccaccctctatcaccggcaccaccccagaaatctgggtatctctagagtttctttcagcaaatgctacccacttrggacaaaggcaggccccagggaattaatcttgacatcacctgctaactcatgcccatatctagcctttcaccaagtactgacagttctatccactacgtatttctcaaacccatctactatttccatttctacagccactactaccaatagactattaccctttcaccccaaattatttcggtagtctcctattggatcttactctagtccattatcattggctcaaagtgtgatgtcacctatttataaccctccaagggcttcccaagacctctgcaataaagcacaaaaaccataaacctggcccccaattcctccctgctctgcttgkgccaactcctcctaggacatattcccctactcttatcactccccaagcttcagccatcatgcctaggttttgattctcatccctttggcatggctacctcctatgcatcctgcagttttcagctttaaaaggttactgtgtgtaaacctttcccccaagccactaccttcctcctccattcatttattcaacaaatacttttcaaatccccacaatgggccaggcccccaaaggattaagccatgaacacaagagacaagatttttgctgtcatttaacatgtgactatagttataaatggagggggcatttcctcaaggaagaaacatttaagggcgtggatttgagaaatacatggccggtggaactgtcagcacttccttccttgaggaagaaatatttaatttcagtgatcaggtgtttgatgttcgacactctcattgccttctccatttataactatattcacatgttacgtgacagcaaggaccttgtctttcctattcatggcttaatcccttggggacctggcccattgtgggaaattgaaaagcatttgttgaataaatgaatagaggaggaaggcagtggcttgaggaaaaggtttatactaaggaaattccagttttgaagcaaaaagtcaaatatttcctgggacacatacatggcccctactacctcactgggtgagatgtgagagaacaaaaaaagtttatctggttccatgagatccactgtaattttcagaaatctcttgcccactggcaggggttggccaggggtagaggggtcaccttgcagcttttagacatagtggaagaatagaagccttcctgcttataagacttcaaacataaaaaatatttaaagactatctttgggaatgaccttagatgtcctccaggtcagatagattacttttttacttttcagataaggcaacagacatctggaaagtggatgtgagttgcccactgccacggcttgtgtatattttctccatacaccgcatagttatattcacattctcacccctttccttgcctacactttgaacagagagaagattctagacacagataaagacttccaattccagagtctactacagactgcatgcagcttggcagggggataaaatccttgagtcagtcaacagggagatccgttaacgtctcaggagaccttaggaatctcacctcacctcttggggcccctatttctttatctggcaaatcatagtaatatgatgacactgtcaagtacagcaaggcccacagattcaagaaaagaatgtggattctaaaagtactttaaaatcatcaagtttcacaaaggcttaacatgacagagcaattaaatttgcctaaattggagtagcccagaaatagaatggactgctttgggcatggcaaaaaagagacaagtctttggattcagagagtgtggttctgaccatagctcaaccactgtgtggctgtggacaaatcattaaatctctcagtccctcagtttcctcaagtgtactcagaggcaaacaaaagtaataaccacatgagattgttgggaaaagaaaatgagttaataatacataaagcacttagaatagtcctggtgtataataaatgttagctgttatgttttgttgttatttttgttgttgagctacccaagactagaggtgcccagacatggatttaatagcagtaaagaggatcttgctccaggcagggagttggattctaaagactatcttttaatgctgaagtttatgaagtcagtggaaatcagaaatatctttattctgttgtttcccaccagatactttttcctgtctctgcaaggaacttgtgggaagtctctaatctcaaaagctcagaaaattgacaaactccccccagacaaaagaaacctggaaatccagagttggagaagcagacagaggcctgcccctgtccccgaagtggctcgaccmacycaccacccagtgtcatctatcacaggacaggacttcagtgccagcaccccaaaragctctaaccctcccaagaggaagcatgtggaagagtcagtrctccacgaacagrgatgtggcacggagtgcatgagggatgactcatgctcaggggactcctcagctcaaytctcatccggggagcacctgctgggacctaacaggataatggcctactcaagaggacagactgatatgtgccggtgctcaaagaggagcagccatcgccgatcccagagttcactgaccatatgaggagctgcagaaatctgtacaaactcaacagaggccacctagtcactggtccacataacccttgaccccttcttcttcatagaggaaacaatgtgccagtcttattcttttcttcaacaaccttgacttccatggaggaagtgctggccccaaggggtctgacacaaagacgggaaacccagtcggcctctagttttctgctgctctcaggcagcacatcttgcaaacagtttggagaaggaggctgtttttgttgaatcgagttctcaaatcggtttagaccaaagccattcttctgaccctctagataagcgtagcctacaacccagtgccgtaagtttccaagattcaagaagtgtatcaacccaggcaatatctcaggatatggaagtttctgggtttatttacccctcagtgcccagagttaaagtttcagaagagacttgtgcacataagggcttcatctcaagtgtattgcagtaatggctgaatcggggttaacatcccttccaggcacagcgagttggttctgctttttgcctgtaagccaaagaaaagccacatctaaaaagctactactaaaagccagaaagaaaagtggatttgaactcagtgtcacagactcttctgagtgttttagggtcacagctagtgtaagaggcatgaagaatagacatgcaaaagggaacgggtgcaccagagacccctgttttggctgacagaccatatgtcccaccagctggggaatctgacaagaggacataggtggcactctttttttaaagctatttattgtatctatttttaaataaaattgcccatcctcattcagctcttagaacaaaagcaaaaaaccctgtaaatcaggagatataagcacatctgcacccagaataggcccatatgatagggcaaccctgagcttaaacaatgacatcttcaagggtagaactaatctgaaaccccattcagcctattccagaatggggataggctgaaacccccttccagcctctggaagacactggcctgcatcagttagagtcagagcaagtgtcacttcacagggaaaagaaggattatatagacttcctatccctagagtttataaatgtcaactatataaaaaaagctcaaaacagtgttaaaggaatgaacagtagaattttaataggctgtccaaagaagccaggtctgctgtgggcaagtatagcctaaccctagtcttgtaaaataagccagaaagggttactgagccaccttaagctagtacctatatagtaggcaaaaagtacagaaatagatgcaataagtgtggtgagtctttgagcctacgagtcatgccaccagccataagttgacctatcacttgagaacctcctcagcaaagatgccagaaaacattcaatcaagttggcaaatgacacagggagctggccctctgaccatcttcctggcaaacctggactggaagggccatttgcagcactgtcctggagctaatacactgtttcactgcctctgccatataatgatgccagcactagccagctggtgggtatttggaggaatcctgcatgaggattgcccaataaggggcaggtacacatacctggcaaagtgatgatgatgtgaattgtttccagtgaggggattgagtcaaaacttggatctcaggtacctcaatttttcccccaatttctggctactactaaaagccagaaagaacagaacagtggcctcaggagatctgagtttgaatccttgctctctaggatgcaggtggcttgaagcagaatgccacacctgcaagttgattagaactgcctttcttcccaggcttgacataggtattaagtcaaaattacatgaaacccagtggtaaaaaagcctctgaaagctgtaacaccctcagtaataacaaaagggatttttatttcacagctaaagggaaaataggtggagaagttaaaaaataatgtctgatcctgttcctaagttccaaactatagccaacactctgatgctgctctttttcttgtaggaccaaccgtcccagtttgcctgggactttctcatttttacagagtcccaaatcctaggaaactggagcaactggtacaactggtcacctactcttgcccctctgtaaatcaagccaactgtgaccatccaatgtgccatcttacagggaaaagttataaccactattcccctataacataatgctaatgattgtacttagtacatttttatacttttatgatattttactgattggaaatgtcatcctttattaaaaataaacatggttttccatagttgcctgccaacctaagttcacattattcttcttttatatcattatcactagttctgaggactttctcatccacccatcctcttttgcattcattcatttattcattcattcatttatctatctaataaatttctgttaagcccctgctagatgcctgacaatttgcgaggtgctgtgaggagctcaatctgtctttgagaagctcacatatttgttgagcatccaatgctgccaacccccactgaacgtatagagtatcaggaacatattcggctatttgacccaacatggaagtatgacacaaaccaaaagggctgcaagaattagaagcagcacgtgcagtctggaactctaacctagctactcctctccttctggaagcccagcaccaacctcgaatcaagactgatttggtccagcaccaacctcaaatcgagactgattttttttattcaatcagtatcaactaagtgcctgttagacatagcactgtgataggcagcaaggataaaatagggaataaaaacaggcccagttcctgcccttaaaaaaattcccaacctagaaagggagacagataatactaaggaagtcaatcaatgtaatattacacattatgagaggaagcgagaatggagatgaaaagagaggaaggttcccaggataatcagaggcttgtccaagaaggagacatttcagctgagaccttaatcatgagaacaagacagcaaagaagggccctttcagagaattaagtacaaaagccccaaagaagaagagtttgtcatatttaaggaaaaggaaggaggttggtgtggctagaagccaataagacagaggaggtgccacaggatcacgttagtagtaacaactgtatttgctcgctgtgtgctaggtgacggcttaagcacacatcatcatggaaacctcacagcagctttataaggtaagggtagttaccctcccctatttcagttagcttctgctgcataaccaccccaaaacttggtaaattaatgcaacaatcatttctgtgcccatgatgctgtgtgtaggcaacttgggctagactccaccaggacatctcacctctgctccacacagaatcagctgaacttgcttctgtctgggggctttggctggtatgactgggatctctctccacgtaacgtctcatcctcaaggtggtcggcctggccttgtcacatagcagcaacactctgggagtgagaacagaagctgcaaagcctttgagatctaagctcaaactcacacatcatcactacccaccacattctatggaagcgagtcccaaggccagcccagtttcaagggtataggaaaatacattccagttttaatgagaagagctgtaaataaacttgaggccatttgaaatctaccacatccacattctcacagagaagctgaagctgatgtgttataaacatatcacagtcatataattaacaagcagcgaggtggcattctaatctgtggagtctgaaaccagaggctgtactcttttattattgagttggagtttcactctttcacccaggctagagtacagtggcatgatctcagctcactgaaacctttgcctcctgggttcaagcgattctcttgcctcagcctcccaagtagctgggattgcaggtgcctgccactacacccagctaattttttttttagtagagacgaggtttcgccacattgaccaggctgatctcaaactcctgacctcagatgatctacctgccttggcctcccaaagtgctgggattataggcatgagccaccgcacctggctgaggctgtacttttgatcacggggctacacaactgcaagatgaggctggagggcaggtggtgaccaggtaacacagggtcttgtcatgtcatatcaacattctcttgagaggcaaggtggtgcagtgcaggcttgaaaattagcaagcctgaatttcatccaactgtcatagacctacagcgtgacctaggaaaggaccacaacacaacgtgtccagccaggttgctgccaagacaaaagcttcagtaagtaaggaagatactagcacctaggaagaaccagaattcatgcctgtattgccctaacatatcttgccctgagttggtcacccagccagaccttcccatgggcgtggagagcccccaggagaaggcagtcacaaaggagtgaatcctcccaggtaccccaaaaagagaagccccaagggaacctgggacccaggcaggactccactgataaaggaggtggggcctataaactcggggcaatgccctgagcaggcaggccttttgagggtactaccagaggagcgctgcccagacaaaacttcaggacacccacaatgagattgtgggcattttcagacaggagccaagtccaggagtctttttgttggaaggtgttctggtgcctccacctagcatcggtggaggaggtacctcactgggggttcttcctgtatcaggggcaggggaaacaggactgagggtggcaggttgtgtgaagagagtgtggggtgatgaagccagaagtcagaggccaggtttcaagtttgggtctgccagcagtttccatgaggcctctggacaaatcctttcaccaggtttcaacctgtttcctcaaactctcgaggtgggaacaagactggttccaacatgctgtgattcttcaagctatctggggaggctgattacagggagggaatgacctctagtatattcaaggccttgtgatttactattttgcagctatctctctgcctccctccccttccctcacacacacacacacacacacacacacacacaccagtggaaaaatcccatgagggaggaaccctggactcattccctgctgtgttcccagtgcttggcacatggcagtgcccaggaatactgtgattgttgctactgaagaaaatcataagtgagggctgctgtcagacagaggtaaaggggagataatgggttggacccctatgcctttttgaggtcctggattgcctttttcagattagtggctattaagaagctgcaaataactgatgagagtccagggcatctgccctccccaactgtcaggaggcaaacccaagccagaacacctcttttcctcatgcaggccctaaggtatgctaaggagtggggaagaggagctttcatctcctgtaacttccawcaacacctgcgctcacacacccccaacaaaacataattgcttactaggtaattaaaacaccaagacaagtctctagtgcccctgtccaagcactgccctgcctggaagcccctcctctgaggatatgcagactgccacggtgtctcccctgactcttagtaggtctgtgagaggggccaactcctcacaggtcaggcctatggaaaagcaagcccaggtgctgcagggaccaagaccacctgggatacagtaggatcctcagagcctggggaaagcaaatgtgtgcttctcttctggtctgaagaccccagaacagcaaagggaggctgactgagcaggtacttgactttggggaaaatgtttttctccagtgtcaagagctcttcctatcccagctaacctatgtgcccacaagacgaggggaaagatattcctgcatgtaaaatgtcaccatttcatgcagg

SEQ ID NO: 94314 - DNA, 30024 bp, Homo sapiens
  misc_feature (1)...(30024): n = A,T,C or G
gttaatattaatttgctaaactatttgaaaataacatgtaaatgcatctcacctgtatctggtattttttttttcaatgcaagttctccatagaatttactaaataattctccaattttaaattcatccatgagtctagaacttctaaaagtctgaagtaactaaaagaatacaaattagtacatcaatgtagtgcgggaatcaagaaaaaaaacacaatacaaattagcattctctctaaagagggaaataacgggattcctctatctcagtgcatctgtccacagcaaaggttcagaattaggtgtgtctcaaggatttacacttggtctcacaggattcacatccacccagcttatctgggaattagaggttgagatgggtatggtggaagaacatcaggggaagaatgctctaggtgtgttaccttcccaagaaaccaacaacatgactagaacctttctcccagaagcctacaaaaccaaggagcaaccagaaacaaaggaattctaaaatacaaatacaaaaaaaacagaaacaggtcacagtgaccccaacaaccacttaactgcaacgtatcaactgattcccgccagacagtggctcacgcctgtaatcctagcactttgggaggcccaagcaggcggattacgaggtcaggagttcgagaccagtgtgaccaacacagtaaaaccccgtctctactaaaaatacaaaaattagccaggcatggtggcacatgcctgtaatcccagctactcaggaggctgaggcaggagaatcgcttgaacctgggagacagaagttgcagtgagccgagattgcgccactgcactccagcctgaatgacagaacaagactctgtctcaaaaaaagaaagaaaagaaaacatatgggccgggcgcggtggctcacacctgtaatcccagcactttgggaggccgaggcgggcggatcacgaggtcaggagatcgagaccatcccggctaaaacggtgaaacctcgtctctactaaaaatacaaaaaattagccgggcgtagtggcgggcgcctgtagtcccagctacttgggaggctgaggcaggagaatggcgtgaacccgggaggcggagcttgcagtgagccgagatcccgccactgcactccagcctgggcgacagagcgagactccgtctcaaaaaaaaaaaaaaaaaaaaaaaaaagaaaacatatgaactctttcccattgctaaggttttaggaaaaacctcagagatataaggtgatctttcagcaattcctaatagcattaggttttgccaaagccagtaagggtgataaatgaaagagcaataaattccttagtcattttcctccttcattctcctcacaactcagaattcttcttttactacccagaagagtctgaaaacaaaaagccagggtattgtcaggtgatggttggagaatgtgcatcttacccacacatcaatgtgattagatcctatccttccccaaacacatcacccaaaacacaactcaaaactctgattttcttttaaaagttacatgtttaatgtaaaatacgtgtacttagaaacataattaccttaataagaaggtccagggctggaattttacatttagcagctctatcttttgtataaacactggtacaagtgttctaggttttaaaaaaaaaataaccaaaatcatcaataagatataaaaactaagactcagcaatacctgaaactacttctccaagaggagcaataccaaaattcagtatttagctgtggaaaatataacattaggccgggcatagtggctcatgcctataatcccaacactttgggaggcggaggtaggcgatcacctgaggtcaggagttcgagaccagcctggccagcatggtgaaaccctatctctactaaaaatataaaaattagccaggtacggtggtgcacgcctgtaatcccagctactcaggaggctgagggaggagaatcgcttgaacccgggagacggaggttgcagtgagccaagactgtgccactgcactccagcctgaaagtattcacgggactctgtggttcacgcctataatccctttgaggattacagtgtggttcatgcctgtaatccctttgaggattacagtgtggttcgtgcctgtaagcaatttgggaggcggagacgggaagatcacttaagcccaggagttcaagaccagcctaggcaacaaggcgaaaccctgtctctacaaaaaaaaaaaaaaatacaaaaattagctggacatagtggcacatcctgtggtcccagcaacttgggaggctgaggtgtgagaatcacctgagcccacgagatggaggctgcagtgagccatgattgcaccactgcactccagcctggatgacagagcaaaaccctgtctcacaaaataaaaacaaataaacaataaaaataaaaaaatacaaaataaaaattattattttttgagatggagttttgctcttgtcgcccaggctgcagtgaagttatcaagaggccatcagggccccagggagcccagggtgccactgccacctcctcaggaaaaaaaagtattaagatagttattaaaaaaaattatcaaagtagtttctctcacaaaggccttagcttactaaatctaaataactaatgggcaacaagagcaaaactccatctcaaaaaaaaaaaaaaaaaaaaaaacctaatgaagagcccacttcatttgtaacacaatgaagcagaaataagcaaattccccaatgagaaaggaaaatgttttatctttaaaataaaaatccaagttcctcacaccataagttaaaacagatgttgatatataatgtaataaggtatgttttttaattcttaccttaatttcaacagagtaaggtgcgatcttctggcccattttttctaagaaaatacataaaaactttaggatttcttctctacattcacgaaactgtaatgaaagagatacatattgtaaatatgggtaagaggagtcactccaggaatatacaagaaaagcaaaaccaaaattgtcaacttacttcaatactgttgagtgacttccggacaaatacaagcaaaccgaaatctctggaaaaaactaaagatgtctgtaatgctgttcaaaaaaataagtaaacaagttaagagagtgccaagagcatcatgtaaaccactcctaaaggggttgcaatgattttcttattattttttttgagatggagtctcgctctgtcgcccaggctggagtgcagcggcgcgatctcggctcactgcaacctccgcctcccgggttcacgccattctcctatctcagcctcccaagtagctgggactaaaggtgcccaccaccatgcccggctaattttttttttgtatttttagtagagacggggtttcaccgtgttagccaggatggtctcgatctcctgacctcacgatcagcccgcctcggcctcccaaagtgctgggattacaggcgtgagccaccgcgcctggccaaggttgcaacggttttcaaggcagccttataaatataaaacactaacccaaggttgctgtattaaaacaaagcagaaaattctagacaatgttccacagggatgcagtacgcaaaataatggccccaaagatgcctgcatcccaatccctggggtcacatcttgtgaatatgttaaatgtatatagcaaaaggaaattgagcttgcagatggaattaaggtagctaatcagctgaccttaaaatgggaagatcatactggattatccagagagcccaatgtaatcacacaggcccttaaagtaaggagatgaagaagagtgggtcagagagacaggaagttgggaaagcgggagattccaaacctctagttagggggacttgacatgctgttgctggccttgaagaccaagggaagggagctgtgatccaaggaaaggggacagcttcaagaagtatggaatgtcagggacctcaatcctatataacctgaatgaataaggcaatggatcctccccaagagccttcagaaagaaagcagccctgtctggtactttggttctagcttggtgagacctgtgtgggattctgactcacagaatcccccttacagtgggaactgtaagagtaacagacctgtgctgttttaaaccactaagcttgtggtaattgttacagcagcaataaggaactaatacacttcccctggaatctctcaagtgaaaggagatatggcataaatggaaggtaaacttggaagtgctttagaaacaagttactaaacgaacaaaaatgaattctaaatttgaaaccctgagaagagaaagtaatcacgcaatgttagttttttgtttgatatttccccattgttaatatattcttgacaacagatagagtacatataggatacatgtatatagcatctttttttttttttttttgggacggagtcgtgctctgttgcccaggctggagtgcagtggcacaatctcggctcactgcaatctccttctcctgggttcaagacattctcctgtctcagcctcccgaatagctgggactacaggcgctcgccaccatgcccagttaatttttgtatttttagtagagacaaggtttcaccatactggtcaggttggtctccatctcctgacctcaggtgatccagctgccacagcctcccaaagtgctgggattacaggcatgagccaccgcaccgtgccacatatagcatctagtttaaactgtttaagttattcctacaccatattcactactagaccctccggaagaaaatctcaccttttaatagggcacaacatcaaggtctgcatactcgtgttttaaagaaggaatacaggagatccacataattaagtatttgaatatttaaaatgctaaaaagaggcacttttactacaaaggggaaaaagttcccacccaggcattgctaaagagttaaaagaacatgacttcaattacatttcttcaatttttctcaaagtaggaacggcaaatagaggggtttggaaaaggtactggtgggattaggcgagattcaggtgaaagaaaatactttctcttggccgggcccggtggctcacgtctgtaatcccagcactttgggaggccgaggcggggggatcacgaggtcaggagttcgagaccagcctgaccaacatggtgaaaccccatctctactaaaaatacaaaaaaattagccgggcgtggtggcgcgcgcctgtaatcccagctactcggggggctgaggcaggagaatagcttgaacccgggaggcggaggttgcagtgagccgagatcgcgccacttcactccagcctgggcgacagagcgagactccgtctcaaaaaaaaaaaaaattatttctcttgccctgccccccactctgcatagcaatgattgccatattaggggtcgttttcaccaactttggctttaaaatatctttcctctaatactagggggtaaaaagcagtatgacaaatccctttatacacatacacagaaattcccccaagaatctaattgctgtacttcaaaataccgtcatctaaacacagagaagcgccgggctgcccggctccagaacgactcgggaagccaggacccacccgcggcccagctcgggccggtacccacccagcaccgcggggctgctgctcaggacgcattcctgccccaggccgcggatcagttgatgaccggccagggcagcaccgcagcggtccgcagcggacaaggtctcctgcagccgcagcagggagcaacgcacaccggctccggagcccgccatgccgccgagtcccgctcccgcgcgtgcgcccgctcggcccggacccggaaatgcccctacgcgcggaggcggggctgcggggcgcggcggcaggaactttcccggggacccctgcgggaaggcctggccagtaagcgcgcctctttggcccgaatcaacatggaaacctaaggaaaaacgtctgacctgcggaggtagtttgggtggctacttggtgttggacttggctaaataaataccagaggcagataaaacaagcgaggggcctaggtcaagagttccaagtttgttcctcgataaaaaacgacaaacgcggtcgggggcggtgatgcccgcctgcagtcccaacactttaggaagctgaggcggggggatcgcaggagttcgagaccagtctgggcaacataatgagaccatccccaccacctcccgtccttaattttttttaataaaaaaaatctttaagtgagaaatgcatctgtaatgtccttattaaccaaaaacgcctaagggataaagaagcacacgctccctagccaacgctagaggaacacaccccgagagctggtgctgtmggacccagttttcccgcgaaaacgctgccgcgcagggggtcagaccatctggaccaaggggggccgagcgaggcctacttctggtttacgcacgggcgctgaaagaagcggcactgtccccccctgccgatgcgcagtggcgcctcccggaggcggagccacgtacgagcgccgctgtgattggtgaggcyccgccaggggcggagacgaccttgccgccggcgggaactctgggtctcgcggtttgggagcgctactcgccaggtggactcggagtccgcgagcgtcgtcggcaagcggccgcctttccacggtaaccgcgcgccggcggggagggcgtggcgcggagccgacgggaacgtccgcgctgcggagcagggcagggaagccgggaggcgggcccggcccgagcttgtccttgtcgcgcaggtactccgagcactatgtcgtccccggcgtcgaccccgagccgccgcggcagccggcgtggaagggccacccccgcccagacgcgtgagtcccccgagccgggcccactacagcccccggcgccgccccgtctgccctctcgccgcagctggcagcgctgggtgggtgcgcgggacccgggcgctcagcctcgggctgggcgctgccgcttggtgcgcacagacacccacagcaggctgtggcctgggtgctgcttaattcgattgccatttgcctctgtttggtttggttyagtggtgagtcataatgccccaaggaaaagacaaatccaggaaggccggccctgaaagttaatggctgtcttttctgttttgtgtgacacaagctcggagtgaggatgccaggtcatctccctctcagagacgtagaggcgaggattccacctccacgggggagttgcagccgatgccaacctcgcctggagtggacctgcagagccctgctgcgcaggacgtgctgttttccagccctccccaaatgcattcttcaggtgcgtgtctgaagatcttggttttgctgtgcttgatacacagctgatgctttatctgctcaggtttactggctttataacagttggcataacgcctaaagcatcccctctgcacgtgactgagcatgttcttaaccagaggagctgaacggagtgcagaaaatagtagttttagggcttagtgagcagaggaagcagcttctctggtgcttttttttaatagaacatttaagagtgctcagaatctcagccaccgcaggttgcaataaatattcagtttgctgttgcgattagatggtatagatcaacagacaacatgctgtaatttcaggtttgatatgccaccagaatttcctaattttgtttttrtagctatccctcttgactttgatgttagttcaccactgacatacggcactcccagctctcgggtagagggaaccccaagaagtggtgttaggggcacacctgtgagacagaggcctgacctgggctctgcacagaagggcctgcaagtggatctgcagtctgacggggtgagtatgcagtctcctgaaaccatcttatggcsggtatcatgtgggtaactctgttttcatgattctgtcatgtttttctgtgtaggcagcagcagaagatatagtggcaagtgagcagtctctaggccaaaaacttgtgatctggggaacagatgtaaatgtggcagcatgcraagaaaactttcaggtgagctacatgtattaaaattcttactttgggctctgaaaatgttgggagaccrtgtttataatctatatctaagtagccataatgactagaagggccacctgtggtggctcacacctataatcccagtactttgggaggccaaggtgggaggatcacttgaggccaggagtttgatagcagcctgaccaatatagtgagactccatctccaaattaaattttagaaaagaaaaaggaagaaaaatattatttatttctgtctcctgatagtgacatactcataactttgtgtgtttttagtagttgcctgttcccaaatgctatatgcctaatacagttttctctccacttaaagagatttcttcagcgttttattgaccctctggctaaagaagaagaaaatgttggcatagatattactgaacctctatacatgcaacgacttggggaggtaatcaaatactctttaaattcaagttacgtgttttaaaatagttaaattagcaaaatataacttgttcattttyattttctagattaatgttattggtgagccatttttaaatgtgaactgtgaacacatcaaatcatttgacaaaaatttgtacagacaactcatctcttacccacaggtaagaatttagctttgaccttgatgaattttagtaacagtctagaaagaatgtttccagataacagaaattcttcagtaatgaagatagtatgcgcaaacactttaagaaactgagtatcatctcctttggcccggtgtggtggctcacacctataatcccagcactttaggacgccgaggcaaatggatcacttgaggtcggaagtttgagaccagcctgggcaacaaagtgaaaccccatctgtactaaaaaatacaaaaattagccagacatggtggtgcatgcctgtagtcccagctactcgggagtctgaagcgatagaatcacttgaaccccggaggcagaggtgcagtgagccgagatggcaccactgctctccagcctgggcaacagtgagattccatctcaaacaaacaaaaaaaaactatgtatcatctcctttaagatgaacatttttttttcacattttaatgttcctgaaagtgggacttgtattactatcaatgacaggttatggtttacttggcagtgtttttcatgtagaaaaatgatgaatcttaaaactgatagcttcttgggtttcatgaagtaagttatcttaaatggaaatactttaaatgaattacatacttcctgctgctttgaaagaatatattgtactgtagacttttacttctaagcctcaggtcagtttctattaatgaagtatcagctctgttgactctgggtgtagtctttggaggcaagcagacttggtttttgaatcttggttttgctgattactggctgcataaccttggtcaagttccttagccaaccaaaagctgtttcctcatctgtaaaatgggaaccatatgttaagaaatttgaataaatatgatttaacttactttggtatcgccaggcacggtggctcatgcctgtgatcccagcactttgggaggccgaggcaggcagatcacctgaggttgggagttcaagaccagcctgaccaacgtggagaaaccccgtctctattaaaaatacaaaattagtcaggcgtggtggcaaatgcctgtaatcccagctactcgggaggctgaggcaggagaattacttgaatcccagaggcagaggttgcagtgagccaagatcatgctgttgcactccagcctgggcaacaagagtgaaactctgcctcaaaaattaaaaataaataaataaaaaacttactttggtatcacttcattatagaaggaaaataaagtgtgaggtcaaaatctttttcccttctaatagaaagcaaagaatatgccagtatacatcaagaaggcactttcrtataaattatgaaatttaacccaattgaaaatatgcagaaatagatagttcagcatacctaaatttgaaaacagcacgtgcatgattctgtagggtaatactttggggacatgacatgttgtctttttatactttgctaatctgacatgcctttattatatttaacactgagatatgaatacaaatacatcttcatatttgtttttacaggaagttattccaacttttgacatggctgtcaatgaaatcttctttgaccgttaccctgactcaatcttagaacatcagattcaagtaagaccattcaacgcattgaagactaagaatatgagaaacctgaatccagaaggtaatgtatttttcatagkattacttttgttgaaggaaaatgccttacatgaaaatagccttgttttcattgagaaattatgaaagaagtaattggcggtggtagtcaaggtgacggattataaattgacaataatatagattcagttatcctatatacttatgaaccccctatactttttaaatttaattgaagtttctgatataagagatgtgactattggccgggcacagtggctcacgcctataatcccagcacttcaggaggccgaggcaggcggatcacctgaggtcaggagtttgagaccagcctggccaacatggcaaaactcctttactaaaaatagaaaaattaccagggcatggtggcacacgcctgtagtcccggctactctcgggaggctgaggcaggagaaacgcttgaacccgggaggcggaggttgcactgagcagaggctgtgccattgcactccagcctgggtgacagaatgagaccctgtctcaaaaaaaaaaaaaaattagattttaaagatttgaggatcacttgaggccaggagtttgagaccagcttgagtgacataagagactccatctctttttaagaagaaattagcaaggcacagtggctcacacatgtaatcctagcactctgggaggctgaggtgacgggcttacttgagcctggcaggttgaggcttcagtgagcagtgattgcaccactgtactccagtctgggcaacaggttaagaccccatctcaacaacaacaaaattgtagaggtctcatgaatcagtggcaggatagggtgatcttcacggctagcagtggctaaatacaggccagaacagggtagcttgtctgaaaccagcaggggaaattagttgcgggcagtgggaccttcaaagggaaaaagttgtctgtcaggaaaggttcaaataatagaggaaacgagcaagagtgaaagatcagagcatctaaggggttctcctgtgtggataataatgactttaaagtatagaggactttttctctaccaggtgctcttactaggcttgaagtacattggcacgttcagtccttggctctgggataggtgctgataccaccccattctataggggacacaaaatgtacacagaaaggctagggtcaggactcagtccaggctgtctggcttttttcctgacacagcagggtgtcatacaggaggccaggtgagtgaggcaggaggcagggagcagggtaggcagacaagaagggaacgagggatgcctgctggacaggggccctgaggaagaagggccagaggttcgctgggcttgagagtctcctgaagacatagcctgcagatgactggacacagaaaggtcgccctaggcagagtcttgggcacctagctcctgtctgtgatcccagctattcctggacctccacacctcaggtcaggtgtgctgacctctcytctcccctcacagacattgaccagctcatcaccatcagcggcatggtgatcaggacatcccagctgattcccgagatgcaggaggccttcttccagtgccaagtgtgtgcccacacgacccgggtggagatggaccgcggccgcattgcagagcccagtgtgtgcgggcgctgccacaccacccacagcatggcactcatccacaaccgctccctcttctctgacaagcagatggtgcgcagccaccctggccccccaggctatgctttgcctgtctgtatcctcaaaaggccaactataacttgtccctcggaccctgagcctcacttcccgaatggcatccatccctctctggtcttgtgggtttcgttagtggcctatgggctaaatatgcagagcacgcaaagcccctgcttcagggcactgtccctgtgctgttgccagtggcactgtctgttgttagagacactgtattttcatggcctaaaatgcttcaaacgtttgagatgagaatacttggttaaatgtcattctgctttttccattggtaaaggattgaggaatttttctgaaattttttcacaaattttactgtctaagaagtttggtcttttttctctatattcatgaaattttaagatgaagttattaaaatgacagaaaaaagtgaggggaaggtagaaaattgcttatttaccgtgattgtgactgtaaagatgtgggaggacaggatttgagtttttctgtgactgcgtgtgcatggtttctttaatgttgcatgggatggagagctggagacagaaaggcaggcaccctgctccgcaggagcacatggcctcctattctcagaatcatgcaggcccccaaagtggcttagagaaaagcccagcatccttaggcctctcagagggtacctggtttggaaaggccttcctcgaccctgctttatgaaaagcatctcagcttcccccaccgcagctccctacattccttcccctgttttgttgctgtctgttgcagcaacttctttagaagaagtaatttctaaggaaataatgagaaacatggacaatcatttatgtggggatatgcactgcagccttatatggcaaaagcagtacaaagacatgcagattttgtccccctgccctctctttgtggcccacatgttctctgtttgctgaccttcagatcaagcttcaggagtctccggaagacatgcctgcagggcagacaccacacacagttatcctgtttgctcacaatgatctcgttgacaaggtccagcctggggacagagtgaatgttacaggtaagagtgtaggtttgcaycagcacttgagcatgtctggcttgctttcaatgctgtgctttagtgagtcattggacttggtcacaggtccagttctacctccagttgtcactgcttgtctttgagactgtggggtatatccctgctttatctgccacctttttaactgagtaccatggcccagcagtatgaaattgttcagttcttcccaaacttgaatgttgkagctcatggttcgtgtggtcactcgcctcttgatacctcagtatcctggagctgtgtgtgtctcaagtcagtactgttggcatcatgagagagcagcctcagacaggcttgtatgggtaaagttttgagttatgccatcagctcagagaagtattactcaccaatgctggagttttaagtaatttttacttaatttcccaaatgtatagccaagggttaacatttgtttgttacagagaaaaatgagtcagtgacttgtttccatgtgtagaagctgaggttcagggatgcatagacagcagtagctcagatgccacggtaaatcagaacccaggacccaggtctccttctcttgctgccacaagagtgctctttgcacagcaccatatgagtgtggcagtcctccttttgatgctgtagagtcacaatggattttggttgggggcaagggagtgttgatggcagcacggttcttcattgatgggcaaggtggcgacggtcgcggagtgcctgaatctgctcctgagcggagggcctggggcacaccacgcatcggctcttgtcttcagtgaggcagtgctcaccctgtttcttccccagtgtgaagtcccgcagttatcactggcaatcttccgtcgtaaaagtacttgaagtcatggagaatttgaaagaatgcgtagtttttagtgagtgacgtgcgcatttccagtcctgctaccctgaaacctttgataaagtatttagtccaatatttttgtttcctcacctacaaagtggagttaatgtgatgatacatgtgtgagagtgtttggggccaaggggctgtggaaagtgctgtgtagatgtgaaataagtatcaatgctgctctgtgagataaatcattccgggccactttaaacataatcttccatccctagcctatattggagtgaagaatagtgtgtattctaagaatgtgtgtaaactggtttgttgtgttaaacaagaattacactgacccactgaataaacaaggacagtgctctgtgccattgcgttgagatagctgtaacggggaaaggccaggctttctccaaaagctgcaggaatcagcctggagttaaagccttctggtttgaaatccagaaaagacgaacatcagatcagacctctgtatgtgaggagcctggcttccagaagaatgcatgatttgcatgcttttgtcgggggtggtgggtaggttggggggacctagtctagttttaatgactggaggattttagcattttgttgcagtcaagtaagtgctaggcagattctgtacactcaacttagggaagtaaaaatactgcttattaaaaacaaccacgaacccagcattgagctagaagcacagcagctccatttcaccctcagggtgactgtgcccgtgggcatgctcacgtagctacagttgccctggagcactgctgactagtgggcccaggtgaacacgtcctcgggtctatcatttgcagaaacctgggttctttctcttttgttttgttttgttttgttttgtttcattttgttttgttttgtttttgagacggagttttgctctcgtcacccaggctggagtccaatggcaccatcttggctcaccgcaacctccgcctcccaggttcaagccattctcctgcctcagcctcccgagtagctgggattacaggcatgtgccaccacgcccggctaatttttgtatttttagtagagacagggttctccttgttgattagggtggtctcgaactcccaacctcaggtgatccgcctgcctcagcctcccaaagtgctaggattacagacatgagccaccttggttctttcgagcttgtccgtttcctgctgctatttccctgcttgctcatagcaagcgggagctttgcaatgtgggcctgagtcctgggcttgggagggtcatttaagagacggtggagctcaccctttccagggccagcccgacgtggtgcctcgctctgaagtgcacctgttgcctacgctggttgctgagccactcggaggaagatatgggaaggtaaaagtgcatctcctggttgtgccctcaggcatctatcgagctgtgcctattcgagtcartccaagagtgagtaatgtgaagtctgtctacaaaacccacattgatgtcattcattatcggaaaacggatgcaaaacgtctgcatggccttgatgaagaagcagaacagaaacttttttcagagaaacgtgtggaattgcttaaggaactttccaggaaaccagacatttatgagaggcttgcttcagccttggctccaagcatttatgaacatgaagatataaagaaggtaacagtggattttaaactaggggttgggatttacaattctttgggatcaaatagtataaacatccactccgccactcgagccatccgccataaaggacagagttgtggcctgttagagcaagtgctggcaacctgacttgccattggttgagaagaatcatagcattgtctatcctcatctctggtctaaacttaggtttctaaacagaagaggccacacagtgtcagaatagggacttgcatggccaccattctggtgtaatgataggtgctgatgaaytggtcagtgataacttaaagcatatcaagcactttcacgagcctttttataccttcctgtgatttcttaattgtagttctttataagagagaaaagtacctctaaagtttaaactacatctcagttaactgtgcagaaaatgaatgtttagacatgtctctgattatttagggaattttgcttcagctctttggcgggacaaggaaggattttagtcacactggaaggggcaaatttcgggctgagatcaacatcttgctgtgtggcgaccctggtaccagcaagtcccagctgctgcagtacgtgtacaacctygtccccaggggccagtacacgtctgggaagggctccagtgcagttggcctcactgcgtacgtaatgaaagaccctgagacaaggcagctggtcctgcagacaggtgctcttgtcctgagtgacaacggcatctgctgtatcgatgagttcgacaagatgaatgaaagtacaagatcggtattgcatgaagtcatggaacagcagactctgtccattgcaaaggtgagtcgccttctccaccgtgaacatggacgtgtttaaaatatgtggacccttgaaagacagggtctgtggaactgtgctgtgctaccttggttctaacttggggagattgataagtgctttccacatcatatttcagctaaatctcaacatgtcttctacagggtgtcacgttttgtctttattgctgtactagccttgaatttgtcctaaagctcttgcaaggtgcctgcttcctgagaaagatgtggttatagcacacattcatctaaactcagtccttggcatgaatctgaggacagggcttatccaggtgaactgctgaagtcagtaaaggcaacatggctcaggcaatagaaactcagtggagggaatatgggtttagtaggtggccgggcgaagacggtgcttgttaattgccagcgtcagggagaggcttctaactgcactctttgctctgataggctgggatcatctgtcagctcaatgcgcgcacctctgtcctggcagcagcaaatcccattgagtctcagtggaatcctaaaaaaacaaccattgaaaacatccagctgcctcatactttattatcaaggtattaaaacagatttttattttgttcatttgtagaatattcagggtgagattgaaaaggagctactaagatttcagcaactgctaatggaaactcttcactcttatcaagatgtttcaaatttggttggtcaagagttttcacgacaaggatgatgtgtgttctcatttgttttttaagcagttgggatgtttacctcccacgccgtttacacatggctgtcactcactactcttagtcctaaagccactgctgagagtcaacagagaacaattccgtacagtagatgaggctctgaaaagttagatttattaaagtgcaatcacataatcttcactcttggccccactacaaatattggacatttttcataaatggattttaggttttaattacttgcttttttttctttttttttgacagaagttttttttcccaaaaaaacagttgaatgtgttttcattcaaatctttccattgtcagccaggtacagtgactcacacctgtaattccagcactttgggaggctgaggtgggtggatcgcctgagctcaggagtttgaggccaccctgggcaacttgatgaaaccccatctctactaaaatacaaaaaattagcccggcgtggcggcgcatgcctgtaatcccagctactcgggaggctgaggaggcacaagaattgcttgagcctgggggagtggagattgcagtgagctgagatcataccacttcactctagcttgggctacagagtgagactctgtctcaaaaaaaaaaaaaaaaaaaaaactttccatcgtcaaaattatagtaacgtttccctaagggaagacttcctttgactcagctgattggtccccagccgttccctgggccgacctaaggactagggacagcacagggtgagtggggtgagtggatggacacgaaggccctttccacaccaggcaaagatgcttctccctgatggcgctcacagggtgcacattgactgcacatctgtggtgctcaagcagtcttyagtacgtcgtttgtaggtgtattggtgtctcaactaggaaaacagtttttttgttgttgttttgggtttttttgtttgtttttttgagacagagtctcyctctgtcggccaggctggagtgcagtgacgcgaacttggctcacygcaaccttcgccttccaggttcaagcgattctcctgcttcagcctcccaagtagctgggattacaggcaggcaccaccactcctggctaattgttgcatttttagtagagacaaggtttcacygtgttggccaggctggtctcaaactaccaacctcaggtgatccacctgcctyggcctcacaaggtgctggaaaaacagtatttttactttgttttcttaggtttgatttgatcttcctcwtgctggaccctcaggacgaagcctatgacaggcgtctggctcaccacctggtcgcactgtactaccagagcgaggagcaggcagaggaggagctcctggacatggcggtgctaaaggactacattgcctacgcgcacagcaccatcatgccgcggctaagtgaggaagccagccaggctctcatcgaggtaaccctgctgaaaaaaggcttactgtgcctgtagcccacagcattaatgtaactgaccaatcatctcctttaaaatattaattattttgttacgaataacatactgttctcttccttgttttgagacagagcctggctctcttgcccaggctggagtgcagtggcttgatctcggcttactgcagcctgtggcctgtgcttctgggttcaagcgattctcctgcttcagcctccctattagctgggattacaggtgcccacaaccactccggctaatttttgtatttttagtagagacagagtttcaccgtgttggccaggctggtcttgaaatcctgacctcaagtgatgcgccagcctctgcctcccaaagtgttaggattgcaggcgcaagccaccatgctgggcctaagaataataaacttttcttttttttttttttgtgagacggagtctcgctgtgtcccccaggctggactgcagtggcgcgatctcggctcactgcaagctccacctcccggattcacgccattctcctgcctcagcctcctgagtagctgggattacaggcacccaccaccacgcctggctaattttttgtatttttagtagagacggggtttcactgtgttaggatggtctcgatctcctgacctcgtgatccgcctgcctcggcctcccaaagtgctgggattacaggcgtgagccaccgcgcctagcaatatactattttttataactgtttattacttcctcccatattgcaaaattgatctttccaaatgttgcaaaagggggaaatagttcatttatgtaggtagtacacacactttatatgtttaagtacttacaagcatagtgaatttaagatcaaagacctggtttcaaatagaggcaacactacacagtaatttggaaactgaaaaagtcatccagtttctgtaagcttccttttgcttgtaaaaaacagaatgagctgtcttttaggttcacttttcagcatcctggtacatgagstgaagtgcatgatggcacatttaggttattcaagcattgtgatattaagaaggttcctggtgctttgatgagctttgcatcctaactgagctcctaaaaattctaagatgaaagttacagacattatgtaatttttttgtgtgtcatagtcttgggggttgttaatgaagaawtaagactgtgtcatctgtatgtgaaattgatacaacttacctttgcagcattcycccagcaatccttatgagccccattgtgccccatgtgagcacttttcccagacaggcctgattctccctatgagtgctcacagccttctcctctccccacatgccacattccttccctctgccacgccatgcccgtctctgttcttcagagctacgttagatgccaccctctccaagaattcttcccaagcatctcccagttggaatatgttcacccaccactgcacgctgcacgttgatgtcttcacctgcgatttctgtggtctgtctgtgtagtctctaccacttgatgagctccggggcccaggaccatatctgagttccgtttacttaatggaagcctaagtgttcaaaattcacccacaaaactaaagttgtcaccaaggaggtttgcttttgcttttgtttttctacctacaataggcttatgtagacatgaggaagattggcagtagccggggaatggtttctgcataccctcgacagctagagtcattaatccgcttagcagaagcccatgctaaagtaagattgtctaacaaagttgaagccattgatgtggaagaggccaaacgcctccatcgggaagctctgaagcagtctgcaactgatccccggactggcatcgtggacatatctattcttactacgggttcgttattttcagtgaacagaaaagcttttgaaaattatttcaatatgcatgtagtttatatgtcagatttaagctaacagttaaatcatttgaaacagaagttcttaaccttttttggattaggacccctttgagaatctgatgaaagttgccctttaatcttatcttgataaaaatattgattaacacacacagttttgtgtatagtttttttttgttttttttttttatactttaagttttagggtacatgtgcacaacgtgcagtttagttacatatgtacgcatgtgccatgttggtgtgctgtacccagtaactcgtcatttaacattacgtgtatctccaaatgctatccctcccccctccccccaccccacaacaggccctggtgtgtgatgttccccttcctgtgtccgtgtgttctcattgttcaattccagttttgtgtatagttttaaggagattctgtctccttgactgtctgggaagttttgttaacccattttagagaagttgtttgtttcttagcagcagctgcttgctgcacagatgtgtagactgttaaggaaagcagcagctagtggcttacagaaatttccaaataattaaaaactcattcccttcaaatgtactcagcccctgtcgccttatctttctaggtgatactactaaaggaatatttttgagaatttgaagcatttcatttcataatagcaaaaatgttttcattgatttctttttaaatcagggatgagtgccacctctcgtaaacggaaagaagaattagctgaagcattgaaaaagcttattttatctaagggcaaaacaccagctctaaaataccagcaactttttgaagatattcggggacaatctgacatagtaagtgtttatatgtattttttgtttgatagagctttctctttttccttaatattgcttttgggtttttttcctttatttattaaataataaatatagagaagaatgaagaaaaggaagatgaaccataagccatcatcaagaaataatcacaattaaaatttttggctgggtgcagtagctcacgcctgtaatctcatttgggacgctgaggtgggcagatcacttgcagccaggagtttgaaaccagcctgaccaatatggtgaaaccctgtctctattaaaaatacaaaaattagctggatgtggtgataagcacctgaaatcctagctactcaggaggcttaggcaggagaattgcttgaacctgggaggcggaggttgcagtaagctgagatcccaccattgctctccagcctgggcaccagagcggaactccatctcaaaaaaaaaaaaaaagaaaaaattgttatgcccctttcatagttgttataagtttgctttaggtatgaaatatttgggtgtccttttgtaaataagtaaggtagttgtttagtgaaaagaactatgcagtctttcagtgctggtccactttccatcgctgtgttgtgactgagagggcagagttgatagttacaacgtggactatacagatgccaagtctaccacatggaccatctggctactccactcctgatttagagcataaggcatgtgtacagccaccaaaaagagaaagattctgggtggtactttaacattataattattgtgtttctaacaggtaaaggagggacttgacgtgtacaatatttattttctttctcttccccacaggcaattactaaagatatgtttgaagaagcactgcgtgccctggcagatgatgatttcctgacagtgactgggaagacygtgcgcttgctctgaagccttgtgagcaaggaaggctccctgcatgtcctgcttgctgcacgccacatgggtgtggtctgcatctcagttggccgccatcagtgtaaatagagcttaaagtcatggtttggctgcataaaaattttctaacttgggttcaatatttgtagtgaagtatctgttttcatttttttcacgttataaataaaaatactatgctggccgggcgcggtggctcacacctgtaatcccagcactttgggaggccaatgtgggtggatcatgaggtcaggagttcaagaccagcctagccaagatggtgaaaccccgtctctagtaaagataacaaaaaattagctgggcttgatggcatgcgcctgtaatcccagctactcgggaggttgaggcaggagaatcgcttaaacccaggcggcagaggttgcagtgagccaagatcgcgccactgcactccagcctcagcaatagagtgagactgtctcaaaaaaaaaaaaaaaaaaaaacctgccaattttcaaacataccgtagagattattttcaggtgccattttatagtatagcagcagggcttttactctgtgtatgcacagatgcagtctggggcatggtttgtgtgctggactttctcatggccatcatcagtatgcttatggatttgatgacaggcatagcctgggcatatcacctcattggtaaagggctagagcctttcttttttatggcacttctttttttgagatagggtcttactctgtcaccctggctagagtacactggtacaatcacggctcaatgtaggcttaacctcctgggctcaggtgtatgtcactatgcccrgctactttttgtattttttggtagagacggcttcgccacgttgcccaggctgcaagcgatatgcctrggctcaagcgatctgcccacctcaacttccggaagtgctgagattacaggtgtgagccactgcacccagcctttgttttattttttattttttgagaggtatgattctttctagagattttttctcatggctactattagatcaggaatgggtgattggagattattagattctaggttaacttctaccactttaccctaatacataaaactttttcctaaataaatgatggaaggaataatacttggttacctggcattatttttcagtaagaaaaaagctttactaaccactacatttatggaaatttgtaggggtaagtattttataggtcataaaaaacaccataatataacgaatctcattttctttaaatgtgaattaaatcctaacagtcatctttataaaatgaccataggctaaaatcttacgtgtaagtactactacaataaataatttctgaaacctttaaatcatatgagttgggccttttttataacttggaatcaacattttttaataaagtatccatagaaaatgatagatctggccgggcgcggtggctcacacctgtaatcccagcactttgggaggccgagatggctggatcatgaggtcaggagatcgagaccatcctggctaacactgtgaaaccccgtctctactaaaaatacaaaaaaaattagccgggcctggtggcgggcacctgtagtcccagctactctggaggctgaggcaggagaatgacatgaacctaggaggcggagcttgcagtgagccgagatcatgccactgcactccaggctgggcaacagagtgagactccatctcaaaaaaagaaaaaaaaaaagatctaattgaatatttaaatagcattaaaatgttagcagtagaatgctgtattaaatatcctaagtcgaaaatgtttttaatacacctaatctaccaaacataccttagcctagcctaccttaaaaaggctgagcatacttaaatcagcctatggttgagtaaaatagtgcaaaacaaagcctattttacaataaagtgttacggttgggtgcagtggctcacgcctgtaatcccaacactttgggaggccaaggcaggtggatcctgaagtgaggagttcaagaccagtctggccaacatggccaaaccctgtctctactaaaaataaaaaaaaaattagctcagtgtggtggtgagtgcctataatctcagctactcaggaggctgaggcaggagaattgcttgaaccccggaggtggaggttacagtgagcggaaatcatgccactgcactccagcctggcgatggtgtgatactgtctcaaataaagtgttaaatgtcttgtgtaccacattggtaacacaagaaaaggtcagtcaaaattcaaaatttgaagaacattgaaattgtaacagctttataccatgtaaagttgaaaaatcataagtcgaacaataattaaataatctgtacttattgactaagatgatttccccctgaagtttatgtactagtaatatttttctaaacctagtatttgaataccaagttgaaggtatattcaactgtagatgaagtgtgtgtatagtttcattttaaggggattttagtagaatgaaaataatggggttgtcctgttgctgtcaggttccatcatagtgaatctcagtttaattcagtaaactttgttttctccagagtctaaaataattcagtgcttgcttcagccacacatatgtgagaattggaatgatacacaaaagattatcatggcccctgcacaaagtttgacacacaaatccatgaagcattctatactttcaataaaaactaaaatttggccaggcacaatggctcacgcctataatcccaacactttgggatgccgaggcaggcggatcaagaggtcaggagttcgagaccagcctgaccaacatggtgagactccatctctactaaaaatacagaaattagctgggcatggtggcaggtgcctgtaatcccagctactcaggaggctgaatcacttgaacccaggaggcggaggttgcagtgagacgagatcatgcccttgcactcgcctgggtgacagagtgagactccatctcaaaagaaaaaaaaaattgtagttatttagcaaacttgtttatgtctgtaacctgcctactggtcataagtttcttgagagaaggaatggtcgtatccttcagtgcagtacctggtgcttggcgctagatgcttgttacatgttagtagagataactcctatgaaaggagggtgaaggtgtaaaagtcagaaggcattcttgaaaacagcgaagtattaggctgtagagtggaggaataagaggaattacagtcctgccccataaattcttataagtattcccttagagggtatgcctcataatctcatggaacccaggagatatctagtattgctaattaaaacgacttgctttatttgattggagaatgcatgtgccattctccttcagcatccatcatagataaaaccaactccatctaaaggagtacacaactaataagaggaatgaggaaacccagaatttaatgactcagcacatcagttaggaaatacttttaaaaactgctgttgcttactaaatctaagaaactcttaaaattcttctgtaattcagttttttaaactattattttgaactaatttcatgaccaggcactgtggctcacacctgtaatcccagcactttgggaggctgaggcggatggatcacccgaggtcaggagttcaagaccagcctggctgacatagtgaaaccccgtctctactaaaaatacaaaaaaaaaattagccgggcatggtagtgcgtgcctgtagtcccagctattcaggaggctgaggcagtagaatcgcttgaacccgggaggcagaggttgtggtgagccaagatcataccactgcatcccagcctgggcaacagagcaagactcccatctcaaaaaaaaaaaaaaatagaaataatttcaaacttacacaaaagttgcaagaacagtatagtttccatatacccttcactctgacattcctttaatgatattattttatcaagtttgcttttttgttttgttttgttttgttttgttttgtttttttgaaacagagcctgtctctgtcacccaggctgcagtgcagtggtgcgatctcagctcactgcaacccccacctcccgggttcaagcgattctcctgcctcagcctccctagtagctgggattacaggcgcccaccaccaggcctagctaattttttttatttttagtagagacggggttgcaccatgttggccaggctggtcttgaactcctggactcagatgatccgcccacctcggcctcccaaagtgctgggattacaggtgtgagccaccatgcccgggagtgaaattatttcaaaatacaagtttaaaaaattgaattatagtggcattttaagagtttcttagatttagtaagcaacggcagtttttaatagcatttcctaggctgggcgtggtggctcacgcctgtaatcccagcactttgggaggctgaggcgggcagatcacgaggtcaggagattgagaccatcctggctaacatggtgaaaccccatctctactaaaaatacaaaaaattagccgggcgtggtggcgggcgcctatagtcccagctaatcgggaggctgaggcaggagaatggcgtgaacccaggaggtggaggttgcagtgagctgagatcgcgccactgcactccagcctgggcgacagagcgagattacgtctcaaaaaaaaagtatttcctaactgatgcatagtagagatggggttgcactatattggccaggnnnnnnnnnnnnnnnnnnnnnnnnnnnnnnnnnnnnnnnnnnnnnnnnnnnnnnnnnnnnnnnnnnnnnnnnnnnnnnnnnnnnnnnnnnnnnnnnnnnnnnnnnnnnnnnnnnnnnnnnnnnnnnnnnnnnnnnnnnnnnnnnnnnnnnnnnnnnnnnnnnnnnnnnnnnnnnnnnnnnnnnnnnnnnnnnnnnnnctcactgcagcctcaaactcctgggctcaagtgatcctcctacctcagcctcctgaatagctgggactacaggcacacaccatgatgcctagctaatttttagagatggggtcttgctaccttgcccaggcttctctcaaactcctggcctcagcaatcatcctgcgtctgcctcccaaaatactaagattacaagtatgtgccactgcacccagcctttaatggatgctttttttttttttttttttttttttttcctgttgcccaggctgaacagaaccaatcttggctcactgcaacctccacctcatgggttcaagtggttctcctgtctcagtctcctgagtagctgggattacaaacgtgtgccaccatgcctggctaatttttttttttttttgtaatcatgcctgggattacaggcatgaacaactgttcctggcctcgttttagtaatttctatctctttgttgatattctcatttttgttcatatgttccctcgatttccttttttttttttttgtagttgttgttgttgttgttgttgttgtttttgagacagtctcactctgttacccagactggagtgcaatggtgtggtctcagctcactgcagcctccaactcccaggttcaagcaattcttctgcctcagcctcccgagtagctggtacaacaggcgtgtgccaccacacctggctgatttttgtatttttagtagcgacagggtttcaccatgttggccaggctggtctcgaactccaggtgatctgcccacctcggcctccccaagtgctgggattacaggtgtgagccaccgtgcccagcccctgcattcaatatattttatagccgggcttggtggcttacacctgtaatcccagctattcagggattaaatataaatatataaataaataaatacatatatatatatattttttttttaaacttgtcttgcttccatgaacaccttacgaaggttttcttatggtctggtgctgccttgtctgctcaaataaactttaaaatttgaatatatatgcctaagtttatctcatagtagccctgtcagaagtgaggatctgaaggagggcactgagggtggcacctgcagcaatgagccacctgtaggggcactggtgaagccattgtgcttgtttttctacctgcatcgataagcccccttgatagatacaagttttcacaacttgtggcaacttaggagtttatttgagcatttttcattcagactagggccagacatcagattggattcaacctgggttctgcgggaagtctcaggtaggtaatgtttcaagaagtcagaaaataataggttcatctgaatccaaggagtctgggactcctgctcagaacctgtgcatttctagagatatgggtacatatggtaaaaaaataatgcctagttgcggtggctcacacctgtaatcccagcactttgggaggccgaggcaggtagaccacctctggtcaggagttcgagaccagcctgaccaaaatgttgaaactccatctctactaaaaatacaaaattagctgggcatggtggtacatgcctgtaatctcagctactcaggaggctgaggcaggagaatcgcttgaacctgggaggcgaagttgcagtgagcccagatcacgccactgcactccagcctgggcgtgagaaactctgtctcaaaataataataataataataataatagtaataataaaataaaataaaataaataaatattggctgggcacagtggctcacgcctgtaatcccagcactttgggaggccaaggcaggtggatcctgaagtgaggagttcaagaccagtctggccaacatggccaaaccctgtctctactaaaaataaaaaaaaaattagctcagtgtggtggtgagtgcctataatcccagctactcaagnnnnnnnnnnnnnnnnnnnnnnnnnnnnnnnnnnnnnnnnnnnnnnnnnnnnnnnnnnnnnnnnnnnnnnnnnnnnnnnnnnnnnnnnnnnnnnnnnnnnnnnnnnnnnnnnnnnnnnnnnnnnnnnnnnnnnnnnnnnnnnnnnnnnnnnnnnnnnnnnnnnnnnnnnnnnnnnnnnnnnnnnnnnnnnnnnnnnnnnnnngtgatacaccacctcagcttcccagagtgctgggattagagatgtgagccaccgaagcccagccaacaccccatctttaaaaaaatattggccaggcgcagtggctcacgcctataatcccagcactttgggagaccaaggtgggcagatgacaaggtcaggagatcgagaccatcctggctaacatggtgaaaccctgtctctactaaaaatacaaaaaattagctggacgtggtggcaggctcctgtagtcctagctaatcgggatgctgaggcaggagaatggcgtgaacctgggaggcagagcttgcagtgagccgagatcacgccactgcactccagcctgggcgtgagagactctgtctcaaaataataataataataataataatagtaataataaaa
